(19) United States
(12) Patent Application Publication
(10) Pub. No.: US 2005/0175607 A1
(43) Pub. Date: Aug. 11, 2005

(54) Novel nucleic acids and polypeptides

(76) Inventors: Y Tom Tang, San Jose, CA (US); Chenghua Liu, San Jose, CA (US); Vinod Asundi, Foster City, CA (US); Chongjun Xu, San Jose, CA (US); Tom Wehrman, Stanford, CA (US); Feiyan Ren, Cupertino, CA (US); Yunqing Ma, Santa Clara, CA (US); Ping Zhou, Cupertino, CA (US); Qing A Zha, San Jose, CA (US); Yonghong Yang, San Jose, CA (US); Radoje T Drmanac, Palo Alto, CA (US); Jie Zhang, Campbell, CA (US); Rui-hong Chen, Foster City, CA (US); Jian-Rui Wang, Cupertino, CA (US); Dunrui Wang, Poway, CA (US); Aidong Xue, Sunnyvale, CA (US)

Correspondence Address: NUVELO, INC, 675 ALMANOR AVE., SUNNYVALE, CA, 94085, US

(21) Appl. No.: 10/220,335

(22) PCT Filed: Feb. 26, 2001
(86) PCT No.: PCT/US01/04926

Related U.S. Application Data
(63) Continuation-in-part of application No. 09/515,126, filed on Feb. 28, 2000, now abandoned.

(51) Int. Cl. C12Q 1/68; C07H 21/04; A61K 39/395; C07K 16/24; C07K 14/52

(52) U.S. Cl. 424/145.1; 435/6; 435/69.1; 435/320.1; 435/325; 530/351; 530/388.23; 536/23.5

(57) ABSTRACT

The present invention provides novel nucleic acids, novel polypeptide sequences encoded by these nucleic acids and uses thereof.

### 1. TECHNICAL FIELD

[0001] The present invention provides novel polynucleotides and proteins encoded by such polynucleotides, along with uses for these polynucleotides and proteins, for example in therapeutic, diagnostic and research methods.

### 2. BACKGROUND

[0002] Technology aimed at the discovery of protein factors (including e.g., cytokines, such as lymphokines, interferons, CSFs, chemokines, and interleukins) has matured rapidly over the past decade. The now routine hybridization cloning and expression cloning techniques clone novel polynucleotides “directly” in the sense that they rely on information directly related to the discovered protein (i.e., partial DNA/amino acid sequence of the protein in the case of hybridization cloning; activity of the protein in the case of expression cloning). More recent “indirect” cloning techniques such as signal sequence cloning, which isolates DNA sequences based on the presence of a now well-recognized secretory leader sequence motif, as well as various PCR-based or low stringency hybridization-based cloning techniques, have advanced the state of the art by making available large numbers of DNA/amino acid sequences for proteins that are known to have biological activity, for example, by virtue of their secreted nature in the case of leader sequence cloning, by virtue of their cell or tissue source in the case of PCR-based techniques, or by virtue of structural similarity to other genes of known biological activity.

[0003] Identified polynucleotide and polypeptide sequences have numerous applications in, for example, diagnostics, forensics, gene mapping; identification of mutations responsible for genetic disorders or other traits, to assess biodiversity, and to produce many other types of data and products dependent on DNA and amino acid sequences.

### 3. SUMMARY OF THE INVENTION

[0004] The compositions of the present invention include novel isolated polypeptides, novel isolated polynucleotides encoding such polypeptides, including recombinant DNA molecules, cloned genes or degenerate variants thereof, especially naturally occurring variants such as allelic variants, antisense polynucleotide molecules, and antibodies that specifically recognize one or more epitopes present on such polypeptides, as well as hybridomas producing such antibodies.

[0005] The compositions of the present invention additionally include vectors, including expression vectors, containing the polynucleotides of the invention, cells genetically engineered to contain such polynucleotides and cells genetically engineered to express such polynucleotides.

[0006] The present invention relates to a collection or library of at least one novel nucleic acid sequence assembled from expressed sequence tags (ESTs) isolated mainly by sequencing by hybridization (SBH), and in some cases, sequences obtained from one or more public databases. The invention relates also to the proteins encoded by such polynucleotides, along with therapeutic, diagnostic and research utilities for these polynucleotides and proteins. These nucleic acid sequences are designated as SEQ ID NO: 1-172, or 345-516. The polypeptides sequences are designated SEQ ID NO: 173-344, or 517-688. The nucleic acids and polypeptides are provided in the Sequence Listing. In the nucleic acids provided in the Sequence Listing, A is adenosine; C is cytosine; G is guanine; T is thymine; and N is any of the four bases. In the amino acids provided in the Sequence Listing, * corresponds to the stop codon.

[0007] The nucleic acid sequences of the present invention also include, nucleic acid sequences that hybridize to the complement of SEQ ID NO: 1-172, or 345-516 under stringent hybridization conditions; nucleic acid sequences which are allelic variants or species homologues of any of the nucleic acid sequences recited above, or nucleic acid sequences that encode a peptide comprising a specific domain or truncation of the peptides encoded by SEQ ID NO: 1-172, or 345-516. A polynucleotide comprising a nucleotide sequence having at least 90% identity to an identifying sequence of SEQ ID NO: 1-172, or 345-516 or a degenerate variant or fragment thereof. The identifying sequence can be 100 base pairs in length.

[0008] The nucleic acid sequences of the present invention also include the sequence information from the nucleic acid sequences of SEQ ID NO: 1-172, or 345-516. The sequence information can be a segment of any one of SEQ ID NO: 1-172, or 345-516 that uniquely identifies or represents the sequence information of SEQ ID NO: 1-172, or 345-516.

[0009] A collection as used in this application can be a collection of only one polynucleotide. The collection of sequence information or identifying information of each sequence can be provided on a nucleic acid array. In one embodiment, segments of sequence information is provided on a nucleic acid array to detect the polynucleotide that contains the segment. The array can be designed to detect fill-match or mismatch to the polynucleotide that contains the segment. The collection can also be provided in a computer-readable format This invention also includes the reverse or direct complement of any of the nucleic acid sequences recited above; cloning or expression vectors containing the nucleic acid sequences; and host cells or organisms transformed with these expression vectors. Nucleic acid sequences (or their reverse or direct complements) according to the invention have numerous applications in a variety of techniques known to those skilled in the art of molecular biology, such as use as hybridization probes, use as primers for PCR, use in an array, use in computer-readable media, use in sequencing full-length genes, use for chromosome and gene mapping, use in the recombinant production of protein, and use in the generation of anti-sense DNA or RNA, their chemical analogs and the like.

[0010] In a preferred embodiment, the nucleic acid sequences of SEQ ID NO: 1-172, or 345-516 or novel segments or parts of the nucleic acids of the invention are used as primers in expression assays that are well known in the art. In a particularly preferred embodiment, the nucleic acid sequences of SEQ ID NO: 1-172, or 345-516 or novel segments or parts of the nucleic acids provided herein are used in diagnostics for identifying expressed genes or, as well known in the art and exemplified by Vollrath et al., Science 258:52-59 (1992), as expressed sequence tags for physical mapping of the human genome.

[0011] The isolated polynucleotides of the invention include, but are not limited to, a polynucleotide comprising any one of the nucleotide sequences set forth in SEQ ID NO: 1-172, or 345-516 ; a polynucleotide comprising any of the full length protein coding sequences of SEQ ID NO: 1-172, or 345-516; and a polynucleotide comprising any of the nucleotide sequences of the mature protein coding sequences of SEQ ID NO: 1-172, or 345-516. The polynucleotides of the present invention also include, but are not limited to, a polynucleotide that hybridizes under stringent hybridization conditions to (a) the complement of any one of the nucleotide sequences set forth in SEQ ID NO: 1-172, or 345-516; (b) a nucleotide sequence encoding any one of the amino acid sequences set forth in the Sequence Listing; (c) a polynucleotide which is an allelic variant of any polynucleotides recited above; (d) a polynucleotide which encodes a species homolog (e.g. orthologs) of any of the proteins recited above; or (e) a polynucleotide that encodes a polypeptide comprising a specific domain or truncation of any of the polypeptides comprising an amino acid sequence set forth in the Sequence Listing.

[0012] The isolated polypeptides of the invention include, but are not limited to, a polypeptide comprising any of the amino acid sequences set forth in SEQ ID NO: 173-344, or 517-688; or the corresponding full length or mature protein. Polypeptides of the invention also include polypeptides with biological activity that are encoded by (a) any of the polynucleotides having a nucleotide sequence set forth in SEQ ID NO: 1-172, or 345-516; or (b) polynucleotides that hybridize to the complement of the polynucleotides of (a) under stringent hybridization conditions. Biologically or immunologically active variants of any of the polypeptide sequences in the Sequence Listing, and “substantial equivalents” thereof (e.g., with at least about 65%, 70%,75%, 80%,85%, 90%,95%, 98% or 99% amino acid sequence identity) that preferably retain biological activity are also contemplated. The polypeptides of the invention may be wholly or partially chemically synthesized but are preferably produced by recombinant means using the genetically engineered cells (e.g. host cells) of the invention.

[0013] The invention also provides compositions comprising a polypeptide of the invention. Polypeptide compositions of the invention may further comprise an acceptable carrier, such as a hydrophilic, e.g., pharmaceutically acceptable, carrier.

[0014] The invention also provides host cells transformed or transfected with a polynucleotide of the invention.

[0015] The invention also relates to methods for producing a polypeptide of the invention comprising growing a culture of the host cells of the invention in a suitable culture medium under conditions permitting expression of the desired polypeptide, and purifying the polypeptide from the culture or from the host cells. Preferred embodiments include those in which the protein produced by such process is a mature form. of the protein.

[0016] Polynucleotides according to the invention have numerous applications in a variety of techniques known to those skilled in the art of molecular biology. These techniques include use as hybridization probes, use as oligomers, or primers, for PCR, use for chromosome and gene mapping, use in the recombinant production of protein, and use in generation of anti-sense DNA or RNA, their chemical analogs and the like. For example, when the expression of an mRNA is largely restricted to a particular cell or tissue type, polynucleotides of the invention can be used as hybridization probes to detect the presence of the particular cell or tissue mRNA in a sample using, e.g., in situ hybridization.

[0017] In other exemplary embodiments, the polynucleotides are used in diagnostics as expressed sequence tags for identifying expressed genes or, as well known in the art and exemplified by Vollrath et al., Science 258:52-59 (1992), as expressed sequence tags for physical mapping of the human genome.

[0018] The polypeptides according to the invention can be used in a variety of conventional procedures and methods that are currently applied to other proteins. For example, a polypeptide of the invention can be used to generate an antibody that specifically binds the polypeptide. Such antibodies, particularly monoclonal antibodies, are useful for detecting or quantitating the polypeptide in tissue. The polypeptides of the invention can also be used as molecular weight markers, and as a food supplement.

[0019] Methods are also provided for preventing, treating, or ameliorating a medical condition which comprises the step of administering to a mammalian subject a therapeutically effective amount of a composition comprising a polypeptide of the present invention and a pharmaceutically acceptable carrier.

[0020] In particular, the polypeptides and polynucleotides of the invention can be utilized, for example, in methods for the prevention and/or treatment of disorders involving aberrant protein expression or biological activity.

[0021] The present invention further relates to methods for detecting the presence of the polynucleotides or polypeptides of the invention in a sample. Such methods can, for example, be utilized as part of prognostic and diagnostic evaluation of disorders as recited herein and for the identification of subjects exhibiting a predisposition to such conditions. The invention provides a method for detecting the polynucleotides of the invention in a sample, comprising contacting the sample with a compound that binds to and forms a complex with the polynucleotide of interest for a period sufficient to form the complex and under conditions sufficient to form a complex and detecting the complex such that if a complex is detected, the polynucleotide of interest is detected. The invention also provides a method for detecting the polypeptides of the invention in a sample comprising contacting the sample with a compound that binds to and forms a complex with the polypeptide under conditions and for a period sufficient to form the complex and detecting the formation of the complex such that if a complex is formed, the polypeptide is detected.

[0022] The invention also provides kits comprising polynucleotide probes and/or monoclonal antibodies, and optionally quantitative standards, for carrying out methods of the invention. Furthermore, the invention provides methods for evaluating the efficacy of drugs, and monitoring the progress of patients, involved in clinical trials for the treatment of disorders as recited above.

[0023] The invention also provides methods for the identification of compounds that modulate. (i.e., increase or decrease) the expression or activity of the polynucleotides and/or polypeptides of the invention. Such methods can be utilized, for example, for the identification of compounds that can ameliorate symptoms of disorders as recited herein. Such methods can include, but are not limited to, assays for identifying compounds and other substances that interact with (e.g., bind to) the polypeptides of the invention. The invention provides a method for identifying a compound that binds to the polypeptides of the invention comprising contacting the compound with a polypeptide of the invention in a cell for a time sufficient to form a polypeptide/compound complex, wherein the complex drives expression of a reporter gene sequence in the cell; and detecting the complex by detecting the reporter gene sequence expression such that if expression of the reporter gene is detected the compound the binds to a polypeptide of the invention is identified.

[0024] The methods of the invention also provide methods for treatment which involve the administration of the polynucleotides or polypeptides of the invention to individuals exhibiting symptoms or tendencies. In addition, the invention encompasses methods for treating diseases or disorders as recited herein comprising administering compounds and other substances that modulate the overall activity of the target gene products. Compounds and other substances can effect such modulation either on the level of target gene/protein expression or target protein activity.

[0025] The polypeptides of the present invention and the polynucleotides encoding them are also useful for the same functions known to one of skill in the art as the polypeptides and polynucleotides to which they have homology (set forth in Table 2); for which they have a signature region (as set forth in Table 3); or for which they have homology to a gene family (as set forth in Table 4). If no homology is set forth for a sequence, then the polypeptides and polynucleotides of the present invention are useful for a variety of applications, as described herein, including use in arrays for detection.

### 4. DETAILED DESCRIPTION OF THE INVENTION

[0026] 4.1 Definitions

[0027] It must be noted that as used herein and in the appended claims, the singular forms “a”, “an” and “the” include plural references unless the context clearly dictates otherwise.

[0028] The term “active” refers to those forms of the polypeptide which retain the biologic and/or immunologic activities of any naturally occurring polypeptide. According to the invention, the terms “biologically active” or “biological activity” refer to a protein or peptide having structural, regulatory or biochemical functions of a naturally occurring molecule. Likewise “immunologically active” or “immunological activity” refers to the capability of the natural, recombinant or synthetic polypeptide to induce a specific immune response in appropriate animals or cells and to bind with specific antibodies.

[0029] The term “activated cells” as used in this application are those cells which are engaged in extracellular or intracellular membrane trafficking, including the export of secretory or enzymatic molecules as part of a normal or disease process.

[0030] The terms “complementary” or “complementarity” refer to the natural binding of polynucleotides by base pairing. For example, the sequence 5′-AGT-3′ binds to the complementary sequence 3′-TCA-5′. Complementarity between two single-stranded molecules may be “partial” such that only some of the nucleic acids bind or it may be “complete” such that total complementarity exists between the single stranded molecules. The degree of complementarity between the nucleic acid strands has significant effects on the efficiency and strength of the hybridization between the nucleic acid strands.

[0031] The term “embryonic stem cells (ES)” refers to a cell that can give rise to many differentiated cell types in an embryo or an adult, including the germ cells. The term “germ line stem cells (GSCs)” refers to stem cells derived from primordial stem cells that provide a steady and continuous source of germ cells for the production of gametes. The term “primordial germ cells (PGCs)” refers to a small population of cells set aside from other cell lineages particularly from the yolk sac, mesenteries, or gonadal ridges during embryogenesis that have the potential to differentiate into germ cells and other cells. PGCs are the source from which GSCs and ES cells are derived. The PGCs, the GSCs and the ES cells are capable of self-renewal. Thus these cells not only populate the germ line and give rise to a plurality of terminally differentiated cells that comprise the adult specialized organs, but are able to regenerate themselves.

[0032] The term “expression modulating fragment,” EMF, means a series of nucleotides which modulates the expression of an operably linked ORF or another EMF.

[0033] As used herein, a sequence is said to “modulate the expression of an operably linked sequence” when the expression of the sequence is altered by the presence of the EMF. EMFs include, but are not limited to, promoters, and promoter modulating sequences (inducible elements). One class of EMFs are nucleic acid fragments which induce the expression of an operably linked ORF in response to a specific regulatory factor or physiological event.

[0034] The terms “nucleotide sequence” or “nucleic acid” or “polynucleotide” or “oligonculeotide” are used interchangeably and refer to a heteropolymer of nucleotides or the sequence of these nucleotides. These phrases also refer to DNA or RNA of genomic or synthetic origin which may be single-stranded or double-stranded and may represent the sense or the antisense strand, to peptide nucleic acid (PNA) or to any DNA-like or RNA-like material. In the sequences herein A is adenine, C is cytosine, T is thymine, G is guanine and N is A, C, G or T (U). It is contemplated that where the polynucleotide is RNA, the T (thymine) in the sequences provided herein is substituted with U (uracil). Generally, nucleic acid segments provided by this invention may be assembled from fragments of the genome and short oligonucleotide linkers, or from a series of oligonucleotides, or from individual nucleotides, to provide a synthetic nucleic acid which is capable of being expressed in a recombinant transcriptional unit comprising regulatory elements derived from a microbial or viral operon, or a eukaryotic gene.

[0035] The terms “oligonucleotide fragment” or a “polynucleotide fragment”, “portion,” or “segment” or “probe” or “primer” are used interchangeably and refer to a sequence of nucleotide residues which are at least about 5 nucleotides, more preferably at least about 7 nucleotides, more preferably at least about 9 nucleotides, more preferably at least about 11 nucleotides and most preferably at least about 17 nucleotides. The fragment is preferably less than about 500 nucleotides, preferably less than about 200 nucleotides, more preferably less than about 100 nucleotides, more preferably less than about 50 nucleotides and most preferably less than 30 nucleotides. Preferably the probe is from about 6 nucleotides to about 200 nucleotides, preferably from about 15 to about 50 nucleotides, more preferably from about 17 to 30 nucleotides and most preferably from about 20 to 25 nucleotides. Preferably the fragments can be used in polymerase chain reaction (PCR), various hybridization procedures or microarray procedures to identify or amplify identical or related parts of MRNA or DNA molecules. A fragment or segment may uniquely identify each polynucleotide sequence of the present invention. Preferably the fragment comprises a sequence substantially similar to any one of SEQ ID NOs:1-20.

[0036] Probes may, for example, be used to determine whether specific MRNA molecules are present in a cell or tissue or to isolate similar nucleic acid sequences from chromosomal DNA as described by Walsh et al. (Walsh, P. S. et al., 1992, PCR Methods Appl 1:241-250). They may be labeled by nick translation, Klenow fill-in reaction, PCR, or other methods well known in the art. Probes of the present invention, their preparation and/or labeling are elaborated in Sambrook, J. et al., 1989, Molecular Cloning: A Laboratory Manual, Cold Spring Harbor Laboratory, NY; or Ausubel, F. M. et al., 1989, Current Protocols in Molecular Biology, John Wiley & Sons, New York N.Y., both of which are incorporated herein by reference in their entirety.

[0037] The nucleic acid sequences of the present invention also include the sequence information from the nucleic acid sequences of SEQ ID NO: 1-172, or 345-516. The sequence information can be a segment of any one of SEQ ID NO: 1-172, or 345-516 that uniquely identifies or represents the sequence information of that sequence of SEQ ID NO: 1-172, or 345-516. One such segment can be a twenty-mer nucleic acid sequence because the probability that a twenty-mer is fully matched in the human genome is 1 in 300. In the human genome, there are three billion base pairs in one set of chromosomes. Because 4²⁰ possible twenty-mers exist, there are 300 times more twenty-mers than there are base pairs in a set of human chromosomes. Using the same analysis, the probability for a seventeen-mer to be fully matched in the human genome is approximately 1 in 5. When these segments are used in arrays for expression studies, fifteen-mer segments can be used. The probability that the fifteen-mer is fully matched in the expressed sequences is also approximately one in five because expressed sequences comprise less than approximately 5% of the entire genome sequence.

[0038] Similarly, when using sequence information for detecting a single mismatch, a segment can be a twenty-five mer. The probability that the twenty-five mer would appear in a human genome with a single mismatch is calculated by multiplying the probability for a full match (1÷4²⁵) times the increased probability for mismatch at each nucleotide position (3×25). The probability that an eighteen mer with a single mismatch can be detected in an array for expression studies is approximately one in five. The probability that a twenty-mer with a single mismatch can be detected in a human genome is approximately one in five.

[0039] The term “open reading frame,” ORF, means a series of nucleotide triplets coding for amino acids without any termination codons and is a sequence translatable into protein.

[0040] The terms “operably linked” or “operably associated” refer to functionally related nucleic acid sequences. For example, a promoter is operably associated or operably linked with a coding sequence if the promoter controls the transcription of the coding sequence. While operably linked nucleic acid sequences can be contiguous and in the same reading frame, certain genetic elements e.g. repressor genes are not contiguously linked to the coding sequence but still control transcription/translation of the coding sequence.

[0041] The term “pluripotent” refers to the capability of a cell to differentiate into a number of differentiated cell types that are present in an adult organism. A pluripotent cell is restricted in its differentiation capability in comparison to a totipotent cell.

[0042] The terms “polypeptide” or “peptide” or “amino acid sequence” refer to an oligopeptide, peptide, polypeptide or protein sequence or fragment thereof and to naturally occurring or synthetic molecules. A polypeptide “fragment,” “portion,” or “segment” is a stretch of amino acid residues of at least about 5 amino acids, preferably at least about 7 amino acids, more preferably at least about 9 amino acids and most preferably at least about 17 or more amino acids. The peptide preferably is not greater than about 500 amino acids, more preferably less than 200 amino acids more preferably less than 150 amino acids and most preferably less than 100 amino acids. Preferably the peptide is from about 5 to about 200 amino acids. To be active, any polypeptide must have sufficient length to display biological and/or immunological activity.

[0043] The term “naturally occurring polypeptide” refers to polypeptides produced by cells that have not been genetically engineered and specifically contemplates various polypeptides arising from post-translational modifications of the polypeptide including, but not limited to, acetylation, carboxylation, glycosylation, phosphorylation, lipidation and acylation.

[0044] The term “translated protein coding portion” means a sequence which encodes for the fill length protein which may include any leader sequence or any processing sequence.

[0045] The term “mature protein coding. sequence” means a sequence which encodes a peptide or protein without a signal or leader sequence. The “mature protein portion” means that portion of the protein which does not include a signal or leader sequence. The peptide may have been produced by processing in the cell which removes any leader/signal sequence The mature protein portion may or may not include the initial methionine residue. The methionine residue may be removed from the protein during processing in the cell. The peptide may be produced synthetically or the protein may have been produced using a polynucleotide only encoding for the mature protein coding sequence.

[0046] The term “derivative” refers to polypeptides chemically modified by such techniques as ubiquitination, labeling (e.g., with radionuclides or various enzymes), covalent polymer attachment such as pegylation (derivatization with polyethylene glycol) and insertion or substitution by chemical synthesis of amino acids such as ornithine, which do not normally occur in human proteins.

[0047] The term “variant” (or “analog”) refers to any polypeptide differing from naturally occurring polypeptides by amino acid insertions, deletions, and substitutions, created using, e g., recombinant DNA techniques. Guidance in determining which amino acid residues may be replaced, added or deleted without abolishing activities of interest, may be found by comparing the sequence of the particular polypeptide with that of homologous peptides and minimizing the number of amino acid sequence changes made in regions of high homology (conserved regions) or by replacing amino acids with consensus sequence.

[0048] Alternatively, recombinant variants encoding these same or similar polypeptides may be synthesized or selected by making use of the “redundancy” in the genetic code. Various codon substitutions, such as the silent changes which produce various restriction sites, may be introduced to optimize cloning into a plasmid or viral vector or expression in a particular prokaryotic or eukaryotic system. Mutations in the polynucleotide sequence may be reflected in the polypeptide or domains of other peptides added to the polypeptide to modify the properties of any part of the polypeptide, to change characteristics such as ligand-binding affinities, interchain affinities, or degradation/turnover rate.

[0049] Preferably, amino acid “substitutions” are the result of replacing one amino acid with another amino acid having similar structural and/or chemical properties, i.e., conservative amino acid replacements. “Conservative” amino acid substitutions may be made on the basis of similarity in polarity, charge, solubility, hydrophobicity, hydrophilicity, and/or the amphipathic nature of the residues involved. For example, nonpolar (hydrophobic) amino acids include alanine, leucine, isoleucine, valine, proline, phenylalanine, tryptophan, and methionine; polar neutral amino acids include glycine, serine, threonine, cysteine, tyrosine, asparagine, and glutamine; positively charged (basic) amino acids include arginine, lysine, and histidine; and negatively charged (acidic) amino acids include aspartic acid and glutamic acid. “Insertions” or “deletions” are preferably in the range of about I to 20 amino acids, more preferably 1 to 10 amino acids. The variation allowed may be experimentally determined by systematically making insertions, deletions, or substitutions of amino acids in a polypeptide molecule using recombinant DNA techniques and assaying the resulting recombinant variants for activity.

[0050] Alternatively, where alteration of function is desired, insertions, deletions or non-conservative alterations can be engineered to produce altered polypeptides. Such alterations can, for example, alter one or more of the biological functions or biochemical characteristics of the polypeptides of the invention. For example, such alterations may change polypeptide characteristics such as ligand-binding affinities, interchain affinities, or degradation/turnover rate. Further, such alterations can be selected so as to generate polypeptides that are better suited for expression, scale up and the like in the host cells chosen for expression. For example, cysteine residues can be deleted or substituted with another amino acid residue in order to eliminate disulfide bridges.

[0051] The terms “purified” or “substantially purified” as used herein denotes that the indicated nucleic acid or polypeptide is present in the substantial absence of other biological macromolecules, e.g., polynucleotides, proteins, and the like. In one embodiment, the polynucleotide or polypeptide is purified such that it constitutes at least 95% by weight, more preferably at least 99% by weight, of the indicated biological macromolecules present (but water, buffers, and other small molecules, especially molecules having a molecular weight of less than 1000 daltons, can be present).

[0052] The term “isolated” as used herein refers to a nucleic acid or polypeptide separated from at least one other component (e.g., nucleic acid or polypeptide) present with the nucleic acid or polypeptide in its natural source. In one embodiment, the nucleic acid or polypeptide is found in the presence of (if anything) only a solvent, buffer, ion, or other component normally present in a solution of the same. The terms “isolated” and “purified” do not encompass nucleic acids or polypeptides present in their natural source.

[0053] The term “recombinant,” when used herein to refer to a polypeptide or protein, means that a polypeptide or protein is derived from recombinant (e.g., microbial, insect, or mammalian) expression systems. “Microbial” refers to recombinant polypeptides or proteins made in bacterial or fungal (e.g., yeast) expression systems. As a product, “recombinant microbial” defines a polypeptide or protein essentially free of native endogenous substances and unaccompanied by associated native glycosylation. Polypeptides or proteins expressed in most bacterial cultures, e.g., E. coli, will be free of glycosylation modifications; polypeptides or proteins expressed in yeast will have a glycosylation pattern in general different from those expressed in mammalian cells.

[0054] The term “recombinant expression vehicle or vector” refers to a plasmid or phage or virus or vector, for expressing a polypeptide from a DNA (RNA) sequence. An expression vehicle can comprise a transcriptional unit comprising an assembly of (1) a genetic element or elements having a regulatory role in gene expression, for example, promoters or enhancers, (2) a structural or coding sequence which is transcribed into MRNA and translated into protein, and (3) appropriate transcription initiation and termination sequences. Structural units intended for use in yeast or eukaryotic expression systems preferably include a leader sequence enabling extracellular secretion of translated protein by a host cell. Alternatively, where recombinant protein is expressed without a leader or transport sequence, it may include an amino terminal methionine residue. This residue may or may not be subsequently cleaved from the expressed recombinant protein to provide a final product.

[0055] The term “recombinant expression system” means host cells which have stably integrated a recombinant transcriptional, unit into chromosomal DNA or carry the recombinant transcriptional unit extra chromosomally. Recombinant expression systems as defined herein will express heterologous polypeptides or proteins upon induction of the regulatory elements linked to the DNA segment or synthetic gene to be expressed. This term also means host cells which have stably integrated a recombinant genetic element or elements having a regulatory role in gene expression, for example, promoters or enhancers. Recombinant expression systems as defined herein will express polypeptides or proteins endogenous to the cell upon induction of the regulatory elements linked to the endogenous DNA segment or gene to be expressed. The cells can be prokaryotic or eulcaryotic.

[0056] The term “secreted” includes a protein that is transported across or through a membrane, including transport as a result of signal sequences in its amino acid sequence when it is expressed in a suitable host cell. “Secreted” proteins include without limitation proteins secreted wholly (e.g., soluble proteins) or partially (e.g., receptors) from the cell in which they are expressed. “Secreted” proteins also include without limitation proteins that are transported across the membrane of the endoplasmic reticulum. “Secreted” proteins are also intended to include proteins containing non-typical signal sequences (e.g. Interleukin-1 Beta, see Krasney, P. A. and Young, P. R. (1992) Cytokine 4(2): 134-143) and factors released from damaged cells (e.g. Interleukin-1 Receptor Antagonist, see Arend, W. P. et. al. (1998) Annu. Rev. Immunol. 16:27-55)

[0057] Where desired, an expression vector may be designed to contain a “signal or leader sequence” which will direct the polypeptide through the membrane of a cell. Such a sequence may be naturally present on the polypeptides of the present invention or provided from heterologous protein sources by recombinant DNA techniques.

[0058] The term “stringent” is used to refer to conditions that are commonly understood in the art as stringent Stringent conditions can include highly stringent conditions (i.e., hybridization to filter-bound DNA in 0.5 M NaHPO₄, 7% sodium dodecyl sulfate (SDS), 1 mM EDTA at 65° C., and washing in 0.1×X SSC/0.1% SDS at 68° C.), and moderately stringent conditions (i.e., washing in 0.2×SSC/0.1% SDS at 42° C.). Other exemplary hybridization conditions are described herein in the examples.

[0059] In instances of hybridization of deoxyoligonucleotides, additional exemplary stringent hybridization conditions include washing in 6×SSC/0.05% sodium pyrophosphate at 37° C. (for 14-base oligonucleotides), 48° C. (for 17-base oligos), 55° C. (for 20-base oligonucleotides), and 60° C. (for 23-base oligonucleotides).

[0060] As used herein, “substantially equivalent” can refer both to nucleotide and amino acid sequences, for example a mutant sequence, that varies from a reference sequence by one or more substitutions, deletions, or additions, the net effect of which does not result in an adverse functional dissimilarity between the reference and subject sequences. Typically, such a substantially equivalent sequence varies from one of those listed herein by no more than about 35% (i.e., the number of individual residue substitutions, additions, and/or deletions in a substantially equivalent sequence, as compared to the corresponding reference sequence, divided by the total number of residues in the substantially equivalent sequence is about 0.35 or less). Such a sequence is said to have 65% sequence identity to the listed sequence. In one embodiment, a substantially equivalent, e.g., mutant, sequence of the invention varies from a listed sequence by no more than 30% (70% sequence identity); in a variation of this embodiment, by no more than 25% (75% sequence identity); and in a further variation of this embodiment, by no more than 20% (80% sequence identity) and in a further variation of this embodiment, by no more than 10% (90% sequence identity) and in a further variation of this embodiment, by no more that 5% (95% sequence identity). Substantially equivalent, e.g., mutant, amino acid sequences according to the invention preferably have at least 80% sequence identity with a listed amino acid sequence, more preferably at least 85% sequence identity, more preferably at least 90% sequence identity, more preferably at least 95% identity, more preferably at least 98% identity, and most preferably at least 99% identity. Substantially equivalent nucleotide sequences of the invention can have lower percent sequence identities, taking into account, for example, the redundancy or degeneracy of the genetic code. Preferably, nucleotide sequence has at least about 65% identity, more preferably at least about 75% identity, more preferably at least about 80% sequence identity, more preferably at least about 85% sequence identity, more preferably at least about 90% sequence identity, and most preferably at least about 95% identity, more preferably at least about 98% sequence identity, and most preferably at least about 99% sequence identity. For the purposes of the present invention, sequences having substantially equivalent biological activity and substantially equivalent expression characteristics are considered substantially equivalent. For the purposes of determining equivalence, truncation of the mature sequence (e.g., via a mutation which creates a spurious stop codon) should be disregarded. Sequence identity may be determined, e.g., using the Jotun Hein method (Hein, J. (1990) Methods Enzymol. 183:626-645). Identity between sequences can also be determined by other methods known in the art, e.g. by varying hybridization conditions.

[0061] The term “totipotent” refers to the capability of a cell to differentiate into all of the cell types of an adult organism.

[0062] The term “transformation” means introducing DNA into a suitable host cell so that the DNA is replicable, either as an extrachromosomal element, or by chromosomal integration. The term “transfection” refers to the taking up of an expression vector by a suitable host cell, whether or not any coding sequences are in fact expressed. The term “infection” refers to the introduction of nucleic acids into a suitable host cell by use of a virus or viral vector.

[0063] As used herein, an “uptake modulating fragment,” UMF, means a series of nucleotides which mediate the uptake of a linked DNA fragment into a cell. UMFs can be readily identified using known UMFs as a target sequence or target motif with the computer-based systems described below. The presence and activity of a UMF can be confirmed by attaching the suspected UMF to a marker sequence. The resulting nucleic acid molecule is then incubated with an appropriate host under appropriate conditions and the uptake of the marker sequence is determined. As described above, a UMF will increase the frequency of uptake of a linked marker sequence.

[0064] Each of the above terms is meant to encompass all that is described for each, unless the context dictates otherwise.

[0065] 4.2 Nucleic Acids of the Invention

[0066] Nucleotide sequences of the invention are set forth in the Sequence Listing.

[0067] The isolated polynucleotides of the invention include a polynucleotide comprising the nucleotide sequences of SEQ ID NO: 1-172, or 345-516; a polynucleotide encoding any one of the peptide sequences of SEQ ID NO: 173-344, or 517-688; and a polynucleotide comprising the nucleotide sequence encoding the mature protein coding sequence of the polypeptides of any one of SEQ ID NO: 173-344, or 517-688. The polynucleotides of the present invention also include, but are not limited to, a polynucleotide that hybridizes under stringent conditions to (a) the complement of any of the nucleotides sequences of SEQ ID NO: 1-172, or 345-516; (b) nucleotide sequences encoding any one of the amino acid sequences set forth in the Sequence Listing as SEQ ID NO: 173-344, or 517-688; (c) a polynucleotide which is an allelic variant of any polynucleotide recited above; (d) a polynucleotide which encodes a species homolog of any of the proteins recited above; or (e) a polynucleotide that encodes a polypeptide comprising a specific domain or truncation of the polypeptides of SEQ ID NO: 173-344, or 517-688. Domains of interest may depend on the nature of the encoded polypeptide; e.g., domains in receptor-like polypeptides include ligand-binding, extracellular, transmembrane, or cytoplasmic domains, or combinations thereof, domains in immunoglobulin-like proteins include the variable immunoglobulin-like domains; domains in enzyme-like polypeptides include catalytic and substrate binding domains; and domains in ligand polypeptides include receptor-binding domains.

[0068] The polynucleotides of the invention include naturally occurring or wholly or partially synthetic DNA, e.g., cDNA and genomic DNA, and RNA, e.g., mRNA. The polynucleotides may include all of the coding region of the cDNA or may represent a portion of the coding region of the cDNA.

[0069] The present invention also provides genes corresponding to the cDNA sequences disclosed herein. The corresponding genes can be isolated in accordance with known methods using the sequence information disclosed herein. Such methods include the preparation of probes or primers from the disclosed sequence information for identification and/or amplification of genes in appropriate genomic libraries or other sources of genomic materials. Further 5′ and 3′ sequence can be obtained using methods known in the art. For example, full length cDNA or genomic DNA that corresponds to any of the polynucleotides of SEQ ID NO: 1-172, or 345-516 can be obtained by screening appropriate cDNA or genomic DNA libraries under suitable hybridization conditions using any of the polynucleotides of SEQ ID NO: 1-172, or 345-516 or a portion thereof as a probe. Alternatively, the polynucleotides of SEQ ID NO: 1-172, or 345-516 may be used as the basis for suitable primer(s) that allow identification and/or amplification of genes in appropriate genomic DNA or cDNA libraries.

[0070] The nucleic acid sequences of the invention can be assembled from ESTs and sequences (including cDNA and genomic sequences) obtained from one or more public databases, such as dbEST, gbpri, and UniGene. The EST sequences can provide identifying sequence information, representative fragment or segment information, or novel segment information for the full-length gene.

[0071] The polynucleotides of the invention also provide polynucleotides including nucleotide sequences that are substantially equivalent to the polynucleotides recited above. Polynucleotides according to the invention can have, e.g., at least about 65%, at least about 70%, at least about 75%, at least about 80%, 81%, 82%, 83%, 84%, more typically at least about 85%, 86%, 87%, 88%, 89%, more typically at least about 90%, 91%, 92%, 93%, 94%, and even more typically at least about 95%, 96%, 97%, 98%, 99%, sequence identity to a polynucleotide recited above.

[0072] Included within the scope of the nucleic acid sequences of the invention are nucleic acid sequence fragments that hybridize under stringent conditions to any of the nucleotide sequences of SEQ ID NO: 1-172, or 345-516, or complements thereof, which fragment is greater than about 5 nucleotides, preferably 7 nucleotides, more preferably greater than 9 nucleotides and most preferably greater than 17 nucleotides. Fragments of, e.g. 15, 17, or 20 nucleotides or more that are selective for (i.e. specifically hybridize to any one of the polynucleotides of the invention) are contemplated. Probes capable of specifically hybridizing to a polynucleotide can differentiate polynucleotide sequences of the invention from other polynucleotide sequences in the same family of genes or can differentiate human genes from genes of other species, and are preferably based on unique nucleotide sequences.

[0073] The sequences falling within the scope of the present invention are not limited to these specific sequences, but also include allelic and species variations thereof Allelic and species variations can be routinely determined by comparing the sequence provided SEQ ID NO: 1-172, or 345-516, a representative fragment thereof, or a nucleotide sequence at least 90% identical, preferably 95% identical, to SEQ ID NO: 1-172, or 345-516 with a sequence from another isolate of the same species. Furthermore, to accommodate codon variability, the invention includes nucleic acid molecules coding for the same amino acid sequences as do the specific ORFs disclosed herein. In other words, in the coding region of an ORF, substitution of one codon for another codon that encodes the same amino acid is expressly contemplated.

[0074] The nearest neighbor or homology result for the nucleic acids of the present invention, including SEQ ID NO: 1-172, or 345-516, can be obtained by searching a database using an algorithm or a program. Preferably, a BLAST which stands for Basic Local Alignment Search Tool is used to search for local sequence alignments (Altshul, S. F. J Mol. Evol. 36 290-300 (1993) and Altschul S. F. et al. J. Mol. Biol. 21:403-410 (1990)). Alternatively a FASTA version 3 search against Genpept, using Fastxy algorithm.

[0075] Species homologs (or orthologs) of the disclosed polynucleotides and proteins are also provided by the present invention. Species homologs may be isolated and identified by making suitable probes or primers from the sequences provided herein and screening a suitable nucleic acid source from the desired species.

[0076] The invention also encompasses allelic variants of the disclosed polynucleotides or proteins; that is, naturally-occurring alternative forms of the isolated polynucleotide which also encode proteins which are identical, homologous or related to that encoded by the polynucleotides.

[0077] The nucleic acid sequences of the invention are further directed to sequences which encode variants of the described nucleic acids. These amino acid sequence variants may be prepared by methods known in the art by introducing appropriate nucleotide changes into a native or variant polynucleotide. There are two variables in the construction of amino acid sequence variants: the location of the mutation and the nature of the mutation. Nucleic acids encoding the amino acid sequence variants are preferably constructed by mutating the polynucleotide to encode an amino acid sequence that does not occur in nature. These nucleic acid alterations can be made at sites that differ in the nucleic acids from different species (variable positions) or in highly conserved regions (constant regions). Sites at such locations will typically be modified in series, e.g., by substituting first with conservative choices (e.g., hydrophobic amino acid to a different hydrophobic amino acid) and then with more distant choices (e.g., hydrophobic amino acid to a charged amino acid), and then deletions or insertions may be made at the target site. Amino acid sequence deletions generally range from about 1 to 30 residues, preferably about 1 to 10 residues, and are typically contiguous. Amino acid insertions include amino- and/or carboxyl-terminal fusions ranging in length from one to one hundred or more residues, as well as intrasequence insertions of single or multiple amino acid residues. Intrasequence insertions may range generally from about 1 to 10 amino residues, preferably from 1 to 5 residues. Examples of terminal insertions include the heterologous signal sequences necessary for secretion or for intracellular targeting in different host cells and sequences such as FLAG or poly-histidine sequences useful for purifying the expressed protein.

[0078] In a preferred method, polynucleotides encoding the novel amino acid sequences are changed via site-directed mutagenesis. This method uses oligonucleotide sequences to alter a polynucleotide to encode the desired amino acid variant, as well as sufficient adjacent nucleotides on both sides of the changed amino acid to form a stable duplex on either side of the site of being changed. In general, the techniques of site-directed mutagenesis are well known to those of skill in the art and this technique is exemplified by publications such as, Edelnan et al., DNA 2:183 (1983). A versatile and efficient method for producing site-specific changes in a polynucleotide sequence was published by Zoller and Smith, Nucleic Acids Res. 10:6487-6500 (1982). PCR may also be used to create amino acid sequence variants of the novel nucleic acids. When small amounts of template DNA are used as starting material, primer(s) that differs slightly in sequence from the corresponding region in the template DNA can generate the desired amino acid variant. PCR amplification results in a population of product DNA fragments that differ from the polynucleotide template encoding the polypeptide at the position specified by the primer. The product DNA fragments replace the corresponding region in the plasmid and this gives a polynucleotide encoding the desired amino acid variant.

[0079] A further technique for generating amino acid variants is the cassette mutagenesis technique described in Wells et al., Gene 34:315 (1985); and other mutagenesis techniques well known in the art, such as, for example, the techniques in Sambrook et al., supra, and Current Protocols in Molecular Biology, Ausubel et al. Due to the inherent degeneracy of the genetic code, other DNA sequences which encode substantially the same or a functionally equivalent amino acid sequence may be used in the practice of the invention for the cloning and expression of these novel nucleic acids. Such DNA sequences include those which are capable of hybridizing to the appropriate novel nucleic acid sequence under stringent conditions.

[0080] Polynucleotides encoding preferred polypeptide truncations of the invention can be used to generate polynucleotides encoding chimeric or fusion proteins comprising one or more domains of the invention and heterologous protein sequences.

[0081] The polynucleotides of the invention additionally include the complement of any of the polynucleotides recited above. The polynucleotide can be DNA (genomic, cDNA, amplified, or synthetic) or RNA. Methods and algorithms for obtaining such polynucleotides are well known to those of skill in the art and can include, for example, methods for determining hybridization conditions that can routinely isolate polynucleotides of the desired sequence identities.

[0082] In accordance with the invention, polynucleotide sequences comprising the mature protein coding sequences corresponding to any one of SEQ ID NO: 1-172, or 345-516, or functional equivalents thereof, may be used to generate recombinant DNA molecules that direct the expression of that nucleic acid, or a functional equivalent thereof, in appropriate host cells. Also included are the cDNA inserts of any of the clones identified herein.

[0083] A polynucleotide according to the invention can be joined to any of a variety of other nucleotide sequences by well-established recombinant DNA techniques (see Sambrook J et al. (1989) Molecular Cloning: A Laboratory Manual, Cold Spring Harbor Laboratory, NY). Useful nucleotide sequences for joining to polynucleotides include an assortment of vectors, e.g., plasmids, cosmids, lambda phage derivatives, phagemids, and the like, that are well known in the art. Accordingly, the invention also provides a vector including a polynucleotide of the invention and a host cell containing the polynucleotide. In general, the vector contains an origin of replication functional in at least one organism, convenient restriction endonuclease sites, and a selectable marker for the host cell. Vectors according to the invention include expression vectors, replication vectors, probe generation vectors, and sequencing vectors. A host cell according to the invention can be a prokaryotic or eukaryotic cell and can be a unicellular organism or part of a multicellular organism.

[0084] The present invention further provides recombinant constructs comprising a nucleic acid having any of the nucleotide sequences of SEQ ID NO: 1-172, or 345-516or a fragment thereof or any other polynucleotides of the invention. In one embodiment, the recombinant constructs of the present invention comprise a vector, such as a plasmid or viral vector, into which a nucleic acid having any of the nucleotide sequences of SEQ ID NO: 1-172, or 345-516 or a fragment thereof is inserted, in a forward or reverse orientation. In the case of a vector comprising one of the ORFs of the present invention, the vector may further comprise regulatory sequences, including for example, a promoter, operably linked to the ORF. Large numbers of suitable vectors and promoters are known to those of skill in the art and are commercially available for generating the recombinant constructs of the present invention. The following vectors are provided by way of example. Bacterial: pBs, phagescript, PsiX174, pBluescript SK, pBs KS, pNH8a, pNH16a, pNH18a, pNH46a (Stratagene); pTrc99A, pKK223-3, pKK233-3, pDR540, pRIT5 (Pharmacia). Eukaryotic: pWLneo, pSV2cat, pOG44, PXTI, pSG (Stratagene) pSVK3, pBPV, pMSG, pSVL (Pharmacia).

[0085] The isolated polynucleotide of the invention may be operably linked to an expression control sequence such as the pMT2 or pED expression vectors disclosed in Kaufman et al., Nucleic Acids Res. 19, 44854490 (1991), in order to produce the protein recombinantly. Many suitable expression control sequences are known in the art. General methods of expressing recombinant proteins are also known and are exemplified in R. Kaufman, Methods in Enzymology 185, 537-566 (1990). As defined herein “operably linked” means that the isolated polynucleotide of the invention and an expression control sequence are situated within a vector or cell in such a way that the protein is expressed by a host cell which has been transformed (transfected) with the ligated polynucleotide/expression control sequence.

[0086] Promoter regions can be selected from any desired gene using CAT (chloramphenicol transferase) vectors or other vectors with selectable markers. Two appropriate vectors are pKK232-8 and pCM7. Particular named bacterial promoters include lacI, lacZ, T3, T7, gpt, lambda PR, and trc. Eukaryotic promoters include CMV immediate early, HSV thymidine kinase, early and late SV40, LTRs from retrovirus, and mouse metallothionein-I. Selection of the appropriate vector and promoter is well within the level of ordinary skill in the art. Generally, recombinant expression vectors will include origins of replication and selectable markers permitting transformation of the host cell, e.g., the ampicillin resistance gene of E. coli and S. cerevisiae TRP1 gene, and a promoter derived from a highly-expressed gene to direct transcription of a downstream structural sequence. Such promoters can be derived from operons encoding glycolytic enzymes such as 3-phosphoglycerate kinase (PGK), a-factor, acid phosphatase, or heat shock proteins, among others. The heterologous structural sequence is assembled in appropriate phase with translation initiation and termination sequences, and preferably, a leader sequence capable of directing secretion of translated protein into the periplasmic space or extracellular medium. Optionally, the heterologous sequence can encode a fusion protein including an amino terminal identification peptide imparting desired characteristics, e.g., stabilization or simplified purification of expressed recombinant product. Useful expression vectors for bacterial use are constructed by inserting a structural DNA sequence encoding a desired protein together with suitable translation initiation and termination signals in operable reading phase with a functional promoter. The vector will comprise one or more phenotypic selectable markers and an origin of replication to ensure maintenance of the vector and to, if desirable, provide amplification within the host. Suitable prokaryotic hosts for transformation include E. coli, Bacillus subtilis, Salmonella typhimurium and various species within the genera Pseudoinonas, Streptomyces, and Staphylococcus, although others may also be employed as a matter of choice.

[0087] As a representative but non-limiting example, useful expression vectors for bacterial use can comprise a selectable marker and bacterial origin of replication derived from commercially available plasmids comprising genetic elements of the well known cloning vector pBR322 (ATCC 37017). Such commercial vectors include, for example, pKK223-3 (Pharmacia Fine Chemicals, Uppsala, Sweden) and GEM 1 (Promega Biotech, Madison, Wis., U.S.A.). These pBR322 “backbone” sections are combined with an appropriate promoter and the structural sequence to be expressed. Following transformation of a suitable host strain and growth of the host strain to an appropriate cell density, the selected promoter is induced or derepressed by appropriate means (e.g., temperature shift or chemical induction) and cells are cultured for an additional period. Cells are typically harvested by centrifugation, disrupted by physical or chemical means, and the resulting crude extract retained for further purification.

[0088] Polynucleotides of the invention can also be used to induce immune responses. For example, as described in Fan et al., Nat. Biotech. 17:870-872 (1999), incorporated herein by reference, nucleic acid sequences encoding a polypeptide may be used to generate antibodies against the encoded polypeptide following topical administration of naked plasmid DNA or following injection, and preferably intramuscular injection of the DNA. The nucleic acid sequences are preferably inserted in a recombinant expression vector and may be in the form of naked DNA.

[0089] 4.3 Antisense Nucleic Acids

[0090] Another aspect of the invention pertains to isolated antisense nucleic acid molecules that are hybridizable to or complementary to the nucleic acid molecule comprising the nucleotide sequence of SEQ ID NO: 1-172, or 345-516, or fragments, analogs or derivatives thereof. An “antisense” nucleic acid comprises a nucleotide sequence that is complementary to a “sense” nucleic acid encoding a protein, e.g., complementary to the coding strand of a double-stranded cDNA molecule or complementary to an mRNA sequence. In specific aspects, antisense nucleic acid molecules are provided that comprise a sequence complementary to at least about 10, 25, 50, 100, 250 or 500 nucleotides or an entire coding strand, or to only a portion thereof. Nucleic acid molecules encoding fragments, homologs, derivatives and analogs of a protein of any of SEQ ID NO: 173-344, or 517-688 or antisense nucleic acids complementary to a nucleic acid sequence of SEQ ID NO: 1-172, or 345-516 are additionally provided.

[0091] In one embodiment, an antisense nucleic acid molecule is antisense to a “coding region” of the coding strand of a nucleotide sequence of the invention. The term “coding region” refers to the region of the nucleotide sequence comprising codons which are translated into amino acid residues. In another embodiment, the antisense nucleic acid molecule is antisense to a “noncoding region” of the coding strand of a nucleotide sequence of the invention. The term “noncoding region” refers to 5′ and 3′ sequences which flank the coding region that are not translated into amino acids (i.e., also referred to as 5′ and 3′ untranslated regions).

[0092] Given the coding strand sequences encoding a nucleic acid disclosed herein (e.g., SEQ ID NO: 1-172, or 345-516), antisense nucleic acids of the invention can be designed according to the rules of Watson and Crick or Hoogsteen base pairing. The antisense nucleic acid molecule can be complementary to the entire coding region of an mRNA, but more preferably is an oligonucleotide that is antisense to only a portion of the coding or noncoding region of a mRNA. For example, the antisense oligonucleotide can be complementary to the region surrounding the translation start site of a mRNA. An antisense oligonucleotide can be, for example, about 5, 10, 15, 20, 25, 30, 35, 40, 45 or 50 nucleotides in length. An antisense nucleic acid of the invention can be constructed using chemical synthesis or enzymatic ligation reactions using procedures known in the art. For example, an antisense nucleic acid (e.g., an antisense oligonucleotide) can be chemically synthesized using naturally occurring nucleotides or variously modified nucleotides designed to increase the biological stability of the molecules or to increase the physical stability of the duplex formed between the antisense and sense nucleic acids, e.g., phosphorothioate derivatives and acridine substituted nucleotides can be used.

[0093] Examples of modified nucleotides that can be used to generate the antisense nucleic acid include: 5-fluorouracil, 5-bromouracil, 5-chlorouracil, 5-iodouracil, hypoxanthine, xanthine, 4-acetylcytosine, 5-(carboxyhydroxylmethyl) uracil, 5-carboxymethylaminomethyl-2-thiouridine, 5-carboxymethylaminomethyluracil, dihydrouracil, beta-D-galactosylqueosine, inosine, N6-isopentenyladenine, 1-methylguanine, 1-methylinosine, 2,2-dimethylguanine, 2-methyladenine, 2-methylguanine, 3-methylcytosine, 5-methylcytosine, N6-adenine, 7-methylguanine, 5-methylaminomethyluracil, 5-methoxyaminomethyl-2-thiouracil, beta-D-mannosylqueosine, 5′-methoxycarboxymethyluracil, 5-methoxyuracil, 2-methylthio-N6-isopentenyladenine, uracil-5-oxyacetic acid (v), wybutoxosine, pseudouracil, queosine, 2-thiocytosine, 5-methyl-2-thiouracil, 2-thiouracil, 4-thiouracil, 5-methyluracil, uracil-5-oxyacetic acid methylester, uracil-5-oxyacetic acid (v), 5-methyl-2-thiouracil, 3-(3-amino-3-N-2-carboxypropyl) uracil, (acp3)w, and 2,6-diaminopurine. Alternatively, the antisense nucleic acid can be produced biologically using an expression vector into which a nucleic acid has been subcloned in an antisense orientation (i.e., RNA transcribed from the inserted nucleic acid will be of an antisense orientation to a target nucleic acid of interest, described further in the following subsection).

[0094] The antisense nucleic acid molecules of the invention are typically administered to a subject or generated in situ such that they hybridize with or bind to cellular mRNA and/or genomic DNA encoding a protein according to the invention to thereby inhibit expression of the protein, e.g., by inhibiting transcription and/or translation. The hybridization can be by conventional nucleotide complementarity to form a stable duplex, or, for example, in the case of an antisense nucleic acid molecule that binds to DNA duplexes, through specific interactions in the major groove of the double helix. An example of a route of administration of antisense nucleic acid molecules of the invention includes direct injection at a tissue site. Alternatively, antisense nucleic acid molecules can be modified to target selected cells and then administered systemically. For example, for systemic administration, antisense molecules can be modified such that they specifically bind to receptors or antigens expressed on a selected cell surface, e.g., by linking the antisense nucleic acid molecules to peptides or antibodies that bind to cell surface receptors or antigens. The antisense nucleic acid molecules can also be delivered to cells using the vectors described herein. To achieve sufficient intracellular concentrations of antisense molecules, vector constructs in which the antisense nucleic acid molecule is placed under the control of a strong pol II or pol III promoter are preferred.

[0095] In yet another embodiment, the antisense nucleic acid molecule of the invention is an α-anomeric nucleic acid molecule. An α-anomeric nucleic acid molecule forms specific double-stranded hybrids with complementary RNA in which, contrary to the usual β-units, the strands run parallel to each other (Gaultier et al. (1987) Nucleic Acids Res 15: 6625-6641). The antisense nucleic acid molecule can also comprise a 2′-o-methylribonucleotide (Inoue et al. (1987) Nucleic Acids Res 15: 6131-6148) or a chimeric RNA -DNA analogue (Inoue et al. (1987) FEBS Lett 215: 327-330).

[0096] 4.4 Ribozymes and Pna Moieties

[0097] In still another embodiment, an antisense nucleic acid of the invention is a ribozyme. Ribozymes are catalytic RNA molecules with ribonuclease activity that are capable of cleaving a single-stranded nucleic acid, such as an mRNA, to which they have a complementary region. Thus, ribozymes (e.g., hammerhead ribozymes (described in Haselhoff and Gerlach (1988) Nature 334:585-591)) can be used to catalytically cleave a mRNA transcripts to thereby inhibit translation of a mRNA. A ribozyme having specificity for a nucleic acid of the invention can be designed based upon the nucleotide sequence of a DNA disclosed herein (i.e., SEQ ID NO: 1-172, or 345-516). For example, a derivative of a Tetrahymena L-19 IVS RNA can be constructed in which the nucleotide sequence of the active site is complementary to the nucleotide sequence to be cleaved in a SECX-encoding mRNA. See, e.g., Cech et al. U.S. Pat. No. 4,987,071; and Cech et al. U.S. Pat. No. 5,116,742. Alternatively, SECX mRNA can be used to select a catalytic RNA having a specific ribonuclease activity from a pool of RNA molecules. See, e.g, Bartel et al., (1993) Science 261:1411-1418.

[0098] Alternatively, gene expression can be inhibited by targeting nucleotide sequences complementary to the regulatory region (e.g., promoter and/or enhancers) to form triple helical structures that prevent transcription of the gene in target cells. See generally, Helene. (1991) Anticancer Drug Des. 6: 569-84; Helene. et al. (1992) Ann. N. Y Acad Sci. 660:27-36; and Maher(1992) Bioassays 14: 807-15.

[0099] In various embodiments, the nucleic acids of the invention can be modified at the base moiety, sugar moiety or phosphate backbone to improve, e.g., the stability, hybridization, or solubility of the molecule. For example, the deoxyribose phosphate backbone of the nucleic acids can be modified to generate peptide nucleic acids (see Hyrup et al. (1996) Bioorg Med Chem 4: 5-23). As used herein, the terms “peptide nucleic acids” or “PNAs” refer to nucleic acid mimics, e.g., DNA mimics, in which the deoxyribose phosphate backbone is replaced by a pseudopeptide backbone and only the four natural nucleobases are retained. The neutral backbone of PNAs has been shown to allow for specific hybridization to DNA and RNA under conditions of low ionic strength. The synthesis of PNA oligomers can be performed using standard solid phase peptide synthesis protocols as described in Hyrup et al. (1996) above; Perry-O'Keefe et al. (1996) PNAS 93: 14670-675.

[0100] PNAs of the invention can be used in therapeutic and diagnostic applications. For example, PNAs can be used as antisense or antigene agents for sequence-specific modulation of gene expression by, e.g., inducing transcription or translation arrest or inhibiting replication. PNAs of the invention can also be used, e.g., in the analysis of single base pair mutations in a gene by, e.g., PNA directed PCR clamping; as artificial restriction enzymes when used in combination with other enzymes, e.g., S1 nucleases (Hyrup B. (1996) above); or as probes or primers for DNA sequence and hybridization (Hyrup et al. (1996), above; Perry-O'Keefe (1996), above).

[0101] In another embodiment, PNAs of the invention can be modified, e.g., to enhance their stability or cellular uptake, by attaching lipophilic or other helper groups to PNA, by the formation of PNA-DNA chimeras, or by the use of liposomes or other techniques of drug delivery known in the art. For example, PNA-DNA chimeras can be generated that may combine the advantageous properties of PNA and DNA. Such chimeras allow DNA recognition enzymes, e.g., RNase H and DNA polymerases, to interact with the DNA portion while the PNA portion would provide high binding affinity and specificity. PNA-DNA chimeras can be linked using linkers of appropriate lengths selected in terms of base stacking, number of bonds between the nucleobases, and orientation (Hyrup (1996) above). The synthesis of PNA-DNA chimeras can be performed as described in Hyrup (1996) above and Finn et al. (1996) Nucl Acids Res 24: 3357-63. For example, a DNA chain can be synthesized on a solid support using standard phosphoramidite coupling chemistry, and modified nucleoside analogs, e.g., 5′-(4-methoxytrityl)amino-5′-deoxy-thymidine phosphoramidite, can be used between the PNA and the 5′ end of DNA (Mag et al. (1989) Nucl Acid Res 17: 5973-88). PNA monomers are then coupled in a stepwise manner to produce a chimeric molecule with a 5′ PNA segment and a 3′ DNA segment (Finn et al. (1996) above). Alternatively, chimeric molecules can be synthesized with a 5′ DNA segment and a 3′ PNA segment. See, Petersen et al. (1975) Bioorg Med Chem Lett 5: 1119-11124.

[0102] In other embodiments, the oligonucleotide may include other appended groups such as peptides (e.g., for targeting host cell receptors in vivo), or agents facilitating transport across the cell membrane (see, e.g., Letsinger et al., 1989, Proc. Natl. Acad. Sci. U.S.A. 86:6553-6556; Lemaitre et al., 1987, Proc. Natl. Acad. Sci. 84:648-652; PCT Publication No. WO88/098 10) or the blood-brain barrier (see, e.g., PCT Publication No. WO89/10134). In addition, oligonucleotides can be modified with hybridization triggered cleavage agents (See, e.g., Krol et al., 1988, BioTechniques 6:958-976) or intercalating agents. (See, e.g., Zon, 1988, Pharm. Res. 5: 539-549). To this end, the oligonucleotide may be conjugated to another molecule, e.g., a peptide, a hybridization triggered cross-linking agent, a transport agent, a hybridization-triggered cleavage agent, etc.

[0103] 4.5 Hosts

[0104] The present invention further provides host cells genetically engineered to contain the polynucleotides of the invention. For example, such host cells may contain nucleic acids of the invention introduced into the host cell using known transformation, transfection or infection methods. The present invention still further provides host cells genetically engineered to express the polynucleotides of the invention, wherein such polynucleotides are in operative association with a regulatory sequence heterologous to the host cell which drives expression of the polynucleotides in the cell.

[0105] Knowledge of nucleic acid sequences allows for modification of cells to permit, or increase, expression of endogenous polypeptide. Cells can be modified (e.g., by homologous recombination) to provide increased polypeptide expression by replacing, in whole or in part, the naturally occurring promoter with all or part of a heterologous promoter so that the cells express the polypeptide at higher levels. The heterologous promoter is inserted in such a manner that it is operatively linked to the encoding sequences. See, for example, PCT International Publication No. WO94/12650, PCT International Publication No. WO92/20808, and PCT International Publication No. WO91/09955. It is also contemplated that, in addition to heterologous promoter DNA, amplifiable marker DNA (e.g., ada, dhfr, and the multifunctional CAD gene which encodes carbamyl phosphate synthase, aspartate transcarbamylase, and dihydroorotase) and/or intron DNA may be inserted along with the heterologous promoter DNA. If linked to the coding sequence, amplification of the marker DNA by standard selection methods results in co-amplification of the desired protein coding sequences in the cells.

[0106] The host cell can be a higher eukaryotic host cell, such as a mammalian cell, a lower eukaryotic host cell, such as a yeast cell, or the host cell can be a prokaryotic cell, such as a bacterial cell. Introduction of the recombinant construct into the host cell can be effected by calcium phosphate transfection, DEAE-dextran mediated transfection, or electroporation (Davis, L. et al., Basic Methods in Molecular Biology (1986)). The host cells containing one of the polynucleotides of the invention, can be used in conventional manners to produce the gene product encoded by the isolated fragment (in the case of an ORF) or can be used to produce a heterologous protein under the control of the EMF.

[0107] Any host/vector system can be used to express one or more of the ORFs of the present invention. These include, but are not limited to, eukaryotic hosts such as HeLa cells, Cv-1 cell, COS cells, 293 cells, and Sf9 cells, as well as prokaryotic host such as E. coli and B. subtilis. The most preferred cells are those which do not normally express the particular polypeptide or protein or which expresses the polypeptide or protein at low natural level. Mature proteins can be expressed in mammalian cells, yeast, bacteria, or other cells under the control of appropriate promoters. Cell-free translation systems can also be employed to produce such proteins using RNAs derived from the DNA constructs of the present invention. Appropriate cloning and expression vectors for use with prokaryotic and eukaryotic hosts are described by Sambrook, et al., in Molecular Cloning: A Laboratory Manual, Second Edition, Cold Spring Harbor, New York (1989), the disclosure of which is hereby incorporated by reference.

[0108] Various mammalian cell culture systems can also be employed to express recombinant protein. Examples of mammalian expression systems include the COS-7 lines of monkey kidney fibroblasts, described by Gluzman, Cell 23:175 (1981). Other cell lines capable of expressing a compatible vector are, for example, the C127, monkey COS cells, Chinese Hamster Ovary (CHO) cells, human kidney 293 cells, human epidermal A431 cells, human Colo205 cells, 3T3 cells, CV-1 cells, other transformed primate cell lines, normal diploid cells, cell strains derived from in vitro culture of primary tissue, primary explants, HeLa cells, mouse L cells, BHK, HL-60, U937, HaK or Jurkat cells. Mammalian expression vectors will comprise an origin of replication, a suitable promoter and also any necessary ribosome binding sites, polyadenylation site, splice donor and acceptor sites, transcriptional termination sequences, and 5′ flanking nontranscribed sequences. DNA sequences derived from the SV40 viral genome, for example, SV40 origin, early promoter, enhancer, splice, and polyadenylation sites may be used to provide the required nontranscribed genetic elements. Recombinant polypeptides and proteins produced in bacterial culture are usually isolated by initial extraction from cell pellets, followed by one or more salting-out, aqueous ion exchange or size exclusion chromatography steps. Protein refolding steps can be used, as necessary, in completing configuration of the mature protein. Finally, high performance liquid chromatography (HPLC) can be employed for final purification steps. Microbial cells employed in expression of proteins can be disrupted by any convenient method, including freeze-thaw cycling, sonication, mechanical disruption, or use of cell lysing agents.

[0109] Alternatively, it may be possible to produce the protein in lower eukaryotes such as yeast or insects or in prokaryotes such as bacteria. Potentially suitable yeast strains include Saccharomyces cerevisiae, Schizosaccharomyces pombe, Kluytveromyces strains, Candida, or any yeast strain capable of expressing heterologous proteins. Potentially suitable bacterial strains include Escherichia coli, Bacillus subtilis, Salmonella typhimurium, or any bacterial strain capable of expressing heterologous proteins. If the protein is made in yeast or bacteria, it may be necessary to modify the protein produced therein, for example by phosphorylation or glycosylation of the appropriate sites, in order to obtain the functional protein. Such covalent attachments may be accomplished using known chemical or enzymatic methods.

[0110] In another embodiment of the present invention, cells and tissues may be engineered to express an endogenous gene comprising the polynucleotides of the invention under the control of inducible regulatory elements, in which case the regulatory sequences of the endogenous gene may be replaced by homologous recombination. As described herein, gene targeting can be used to replace a gene's existing regulatory region with a regulatory sequence isolated from a different gene or a novel regulatory sequence synthesized by genetic engineering methods. Such regulatory sequences may be comprised of promoters, enhancers, scaffold-attachment regions, negative regulatory elements, transcriptional initiation sites, regulatory protein binding sites or combinations of said sequences. Alternatively, sequences which affect the structure or stability of the RNA or protein produced may be replaced, removed, added, or otherwise modified by targeting. These sequence include polyadenylation signals, mRNA stability elements, splice sites, leader sequences for enhancing or modifying transport or secretion properties of the protein, or other sequences which alter or improve the function or stability of protein or RNA molecules.

[0111] The targeting event may be a simple insertion of the regulatory sequence, placing the gene under the control of the new regulatory sequence, e.g., inserting a new promoter or enhancer or both upstream of a gene. Alternatively, the targeting event may be a simple deletion of a regulatory element, such as the deletion of a tissue-specific negative regulatory element. Alternatively, the targeting event may replace an existing element; for example, a tissue-specific enhancer can be replaced by an enhancer that has broader or different cell-type specificity than the naturally occurring elements. Here, the naturally occurring sequences are deleted and new sequences are added. In all cases, the identification of the targeting event may be facilitated by the use of one or more selectable marker genes that are contiguous with the targeting DNA, allowing for the selection of cells in which the exogenous DNA has integrated into the host cell genome. The identification of the targeting event may also be facilitated by the use of one or more marker genes exhibiting the property of negative selection, such that the negatively selectable marker is linked to the exogenous DNA, but configured such that the negatively selectable marker flanks the targeting sequence, and such that a correct homologous recombination event with sequences in the host cell genome does not result in the stable integration of the negatively selectable marker. Markers useful for this purpose include the Herpes Simplex Virus thymidine kinase (TK) gene or the bacterial xanthine-guanine phosphoribosyl-transferase (gpt) gene.

[0112] The gene targeting or gene activation techniques which can be used in accordance with this aspect of the invention are more particularly described in U.S. Pat. No. 5,272,071 to Chappel; U.S. Pat. No. 5,578,461 to Sherwin et al.; International Application No. PCTIUS92/09627 (WO93/09222) by Selden et al.; and International Application No. PCTIUS90/06436 (WO91/06667) by Skoultchi et al., each of which is incorporated by reference herein in its entirety.

[0113] 4.6 Polypeptides of the Invention

[0114] The isolated polypeptides of the invention include, but are not limited to, a polypeptide comprising: the amino acid sequences set forth as any one of SEQ ID NO: 173-344, or 517-688 or an amino acid sequence encoded by any one of the nucleotide sequences SEQ ID NO: 1-172, or 345-516 or the corresponding full length or mature protein. Polypeptides of the invention also include polypeptides preferably with biological or immunological activity that are encoded by: (a) a polynucleotide having any one of the nucleotide sequences set forth in SEQ ID NO: 1-172, or 345-516 or (b) polynucleotides encoding any one of the amino acid sequences set forth as SEQ ID NO: 173-344, or 517-688 or (c) polynucleotides that hybridize to the complement of the polynucleotides of either (a) or (b) under stringent hybridization conditions. The invention also provides biologically active or immunologically active variants of any of the amino acid sequences set forth as SEQ ID NO: 173-344, or 517-688 or the corresponding full length or mature protein; and “substantial equivalents” thereof (e.g., with at least about 65%, at least about 70%, at least about 75%, at least about 80%, at least about 85%, 86%, 87%, 88%, 89%, at least about 90%, 91%, 92%, 93%, 94%, typically at least about 95%, 96%, 97%, more typically at least about 98%, or most typically at least about 99% amino acid identity) that retain biological activity. Polypeptides encoded by allelic variants may have a similar, increased, or decreased activity compared to polypeptides comprising SEQ ID NO: 173-344, or 517-688.

[0115] Fragments of the proteins of the present invention which are capable of exhibiting biological activity are also encompassed by the present invention. Fragments of the protein may be in linear form or they may be cyclized using known methods, for example, as described in H. U. Saragovi, et al., Bio/Technology 10, 773-778 (1992) and in R. S. McDowell, et al., J. Amer. Chem. Soc. 114, 9245-9253 (1992), both of which are incorporated herein by reference. Such fragments may be fused to carrier molecules such as immunoglobulins for many purposes, including increasing the valency of protein binding sites.

[0116] The present invention also provides both full-length and mature forms (for example, without a signal sequence or precursor sequence) of the disclosed proteins. The protein coding sequence is identified in the sequence listing by translation of the disclosed nucleotide sequences. The mature form of such protein may be obtained by expression of a full-length polynucleotide in a suitable mammalian cell or other host cell. The sequence of the mature form of the protein is also determinable from the amino acid sequence of the full-length form. Where proteins of the present invention are membrane bound, soluble forms of the proteins are also provided. In such forms, part or all of the regions causing the proteins to be membrane bound are deleted so that the proteins are fully secreted from the cell in which they are expressed.

[0117] Protein compositions of the present invention may further comprise an acceptable carrier, such as a hydrophilic, e.g., pharmaceutically acceptable, carrier.

[0118] The present invention further provides isolated polypeptides encoded by the nucleic acid fragments of the present invention or by degenerate variants of the nucleic acid fragments of the present invention. By “degenerate variant” is intended nucleotide fragments which differ from a nucleic acid fragment of the present invention (e.g., an ORF) by nucleotide sequence but, due to the degeneracy of the genetic code, encode an identical polypeptide sequence. Preferred nucleic acid fragments of the present invention are the ORFs that encode proteins.

[0119] A variety of methodologies known in the art can be utilized to obtain any one of the isolated polypeptides or proteins of the present invention. At the simplest level, the amino acid sequence can be synthesized using commercially available peptide synthesizers. The synthetically-constructed protein sequences, by virtue of sharing primary, secondary or tertiary structural and/or conformational characteristics with proteins may possess biological properties in common therewith, including protein activity. This technique is particularly useful in producing small peptides and fragments of larger polypeptides. Fragments are useful, for example, in generating antibodies against the native polypeptide. Thus, they may be employed as biologically active or immunological substitutes for natural, purified proteins in screening of therapeutic compounds and in immunological processes for the development of antibodies.

[0120] The polypeptides and proteins of the present invention can alternatively be purified from cells which have been altered to express the desired polypeptide or protein. As used herein, a cell is said to be altered to express a desired polypeptide or protein when the cell, through genetic manipulation, is made to produce a polypeptide or protein which it normally does not produce or which the cell normally produces at a lower level. One skilled in the art can readily adapt procedures for introducing and expressing either recombinant or synthetic sequences into eukaryotic or prokaryotic cells in order to generate a cell which produces one of the polypeptides or proteins of the present invention.

[0121] The invention also relates to methods for producing a polypeptide comprising growing a culture of host cells of the invention in a suitable culture medium, and purifying the protein from the cells or the culture in which the cells are grown. For example, the methods of the invention include a process for producing a polypeptide in which a host cell containing a suitable expression vector that includes a polynucleotide of the invention is cultured under conditions that allow expression of the encoded polypeptide. The polypeptide can be recovered from the culture, conveniently from the culture medium, or from a lysate prepared from the host cells and further purified. Preferred embodiments include those in which the protein produced by such process is a full length or mature form of the protein.

[0122] In an alternative method, the polypeptide or protein is purified from bacterial cells which naturally produce the polypeptide or protein. One skilled in the art can readily follow known methods for isolating polypeptides and proteins in order to obtain one of the isolated polypeptides or proteins of the present invention. These include, but are not limited to, immunochromatography, HPLC, size-exclusion chromatography, ion-exchange chromatography, and immuno-affinity chromatography. See, e.g., Scopes, Protein Purification: Principles and Practice, Springer-Verlag (1994); Sambrook, et al., in Molecular Cloning: A Laboratory Manual; Ausubel et al., Current Protocols in Molecular Biology. Polypeptide fragments that retain biological/immunological activity include fragments comprising greater than about 100 amino acids, or greater than about 200 amino acids, and fragments that encode specific protein domains.

[0123] The purified polypeptides can be used in in vitro binding assays which are well known in the art to identify molecules which bind to the polypeptides. These molecules include but are not limited to, for e.g., small molecules, molecules from combinatorial libraries, antibodies or other proteins. The molecules identified in the binding assay are then tested for antagonist or agonist activity in in vivo tissue culture or animal models that are well known in the art. In brief, the molecules are titrated into a plurality of cell cultures or animals and then tested for either cell/animal death or prolonged survival of the animal/cells.

[0124] In addition, the peptides of the invention or molecules capable of binding to the peptides may be complexed with toxins, e.g:, ricin or cholera, or with other compounds that are toxic to cells. The toxin-binding molecule complex is then targeted to a tumor or other cell by the specificity of the binding molecule for SEQ ID NO: 173-344, or 517-688.

[0125] The protein of the invention may also be expressed as a product of transgenic animals, e.g., as a component of the milk of transgenic cows, goats, pigs, or sheep which are characterized by somatic or germ cells containing a nucleotide sequence encoding the protein.

[0126] The proteins provided herein also include proteins characterized by amino acid sequences similar to those of purified proteins but into which modification are naturally provided or deliberately engineered. For example. modifications, in the peptide or DNA sequence, can be made by those skilled in the art using known techniques. Modifications of interest in the protein sequences may include the alteration, substitution, replacement, insertion or deletion of a selected amino acid residue in the coding sequence. For example, one or more of the cysteine residues may be deleted or replaced with another amino acid to alter the conformation of the molecule. Techniques for such alteration, substitution, replacement, insertion or deletion are well known to those skilled in the art (see, e.g., U.S. Pat. No. 4,518,584). Preferably, such alteration, substitution, replacement, insertion or deletion retains the desired activity of the protein. Regions of the protein that are important for the protein function can be determined by various methods known in the art including the alanine-scanning method which involved systematic substitution of single or strings of amino acids with alanine, followed by testing the resulting alanine-containing variant for biological activity. This type of analysis determines the importance of the substituted amino acid(s) in biological activity. Regions of the protein that are important for protein function may be determined by the eMATRIX program.

[0127] Other fragments and derivatives of the sequences of proteins which would be expected to retain protein activity in whole or in part and are useful for screening or other immunological methodologies may also be easily made by those skilled in the art given the disclosures herein. Such modifications are encompassed by the present invention.

[0128] The protein may also be produced by operably linking the isolated polynucleotide of the invention to suitable control sequences in one or more insect expression vectors, and employing an insect expression system. Materials and methods for baculovirus/insect cell expression systems are commercially available in kit form from, e.g., Invitrogen, San Diego, Calif., U.S.A. (the MaxBat™ kit), and such methods are well known in the art, as described in Summers and Smith, Texas Agricultural Experiment Station Bulletin No. 1555 (1987), incorporated herein by reference. As used herein, an insect cell capable of expressing a polynucleotide of the present invention is “transformed.”

[0129] The protein of the invention may be prepared by culturing transformed host cells under culture conditions suitable to express the recombinant protein. The resulting expressed protein may then be purified from such culture (i. e., from culture medium or cell extracts) using known purification processes, such as gel filtration and ion exchange chromatography. The purification of the protein may also include an affinity column containing agents which will bind to the protein; one or more column steps over such affinity resins as concanavalin A-agarose, heparin-toyopearltm or Cibacrom blue 3GA Sepharose™; one or more steps involving hydrophobic interaction chromatography using such resins as phenyl ether, butyl ether, or propyl ether; or immunoaffinity chromatography.

[0130] Alternatively, the protein of the invention may also be expressed in a form which will facilitate purification. For example, it may be expressed as a fusion protein, such as those of maltose binding protein (MBP), glutathione-S-transferase (GST) or thioredoxin (TRX), or as a His tag. Kits for expression and purification of such fusion proteins are commercially available from New England BioLab (Beverly, Mass.), Pharmacia (Piscataway, N.J.) and Invitrogen, respectively. The protein can also be tagged with an epitope and subsequently purified by using a specific antibody directed to such epitope. One such epitope (“FLAG®”) is commercially available from Kodak (New Haven, Conn.).

[0131] Finally, one or more reverse-phase high performance liquid chromatography (RP-HPLC) steps employing hydrophobic RP-HPLC media, e.g., silica gel having pendant methyl or other aliphatic groups, can be employed to further purify the protein. Some or all of the foregoing purification steps, in various combinations, can also be employed to provide a substantially homogeneous isolated recombinant protein. The protein thus purified is substantially free of other mammalian proteins and is defined in accordance with the present invention as an “isolated protein.”

[0132] The polypeptides of the invention include analogs (variants). This embraces fragments, as well as peptides in which one or more amino acids has been deleted, inserted, or substituted. Also, analogs of the polypeptides of the invention embrace fusions of the polypeptides or modifications of the polypeptides of the invention, wherein the polypeptide or analog is fused to another moiety or moieties, e.g., targeting moiety or another therapeutic agent. Such analogs may exhibit improved properties such as activity and/or stability. Examples of moieties which may be fused to the polypeptide or an analog include, for example, targeting moieties which provide for the delivery of polypeptide to pancreatic cells, e.g., antibodies to pancreatic cells, antibodies to immune cells such as T-cells, monocytes, dendritic cells, granulocytes, etc., as well as receptor and ligands expressed on pancreatic or immune cells. Other moieties which may be fused to the polypeptide include therapeutic agents which are used for treatment, for example, immunosuppressive drugs such as cyclosporin, SK506, azathioprine, CD3 antibodies and steroids. Also, polypeptides may be fused to immune modulators, and other cytokines such as alpha or beta interferon.

[0133] 4.6.1 Determining Polypeptide and Polynucleotide Identity and Similarity

[0134] Preferred identity and/or similarity are designed to give the largest match between the sequences tested. Methods to determine identity and similarity are codified in computer programs including, but are not limited to, the GCG program package, including GAP (Devereux, J., et al., Nucleic Acids Research 12(1):387 (1984); Genetics Computer Group, University of Wisconsin, Madison, Wis.), BLASTP, BLASTN, BLASTX, FASTA (Altschul, S. F. et al., J. Molec. Biol. 215:403-410 (1990), PSI-BLAST (Altschul S. F. et al., Nucleic Acids Res. vol. 25, pp.3389-3402, herein incorporated by reference), eMatrix software (Wu et al., J. Comp. Biol., Vol. 6, pp. 219-235 (1999), herein incorporated by reference), eMotif software (Nevill-Manning et al, ISMB-97, Vol. 4, pp. 202-209, herein incorporated by reference), pFam software (Sonnhammer et al., Nucleic Acids Res., Vol. 26(1), pp. 320-322 (1998), herein incorporated by reference) and the Kyte-Doolittle hydrophobocity prediction algorithm (J. Mol Biol, 157, pp. 105-31 (1982), incorporated herein by reference). The BLAST programs are publicly available from the National Center for Biotechnology Information (NCBI) and other sources (BLAST Manual, Altschul, S., et al. NCB NLM NIH Bethesda, Md. 20894; Altschul, S., et al., J. Mol. Biol. 215:403-410 (1990).

[0135] 4.7 Chimeric and Fusion Proteins

[0136] The invention also provides chimeric or fusion proteins. As used herein, a “chimeric protein” or “fusion protein” comprises a polypeptide of the invention operatively linked to another polypeptide. Within a fusion protein the polypeptide according to the invention can correspond to all or a portion of a protein according to the invention. In one embodiment, a fusion protein comprises at least one biologically active portion of a protein according to the invention. In another embodiment, a fusion protein comprises at least two biologically active portions of a protein according to the invention. Within the fusion protein, the term “operatively linked” is intended to indicate that the polypeptide according to the invention and the other polypeptide are fused in-frame to each other. The polypeptide can be fused to the N-terminus or C-terminus.

[0137] For example, in one embodiment a fusion protein comprises a polypeptide according to the invention operably linked to the extracellular domain of a second protein. In another embodiment, the fusion protein is a GST-fusion protein in which the polypeptide sequences of the invention are fused to the C-terminus of the GST (i.e., glutathione S-transferase) sequences.

[0138] In another embodiment, the fusion protein is an immunoglobulin fusion protein in which the polypeptide sequences according to the invention comprise one or more domains fused to sequences derived from a member of the immunoglobulin protein family. The immunoglobulin fusion proteins of the invention can be incorporated into pharmaceutical compositions and administered to a subject to inhibit an interaction between a ligand and a protein of the invention on the surface of a cell, to thereby suppress signal transduction in vivo. The immunoglobulin fusion proteins can be used to affect the bioavailability of a cognate ligand. Inhibition of the ligand/protein interaction may be useful therapeutically for both the treatment of proliferative and differentiative disorders, e.g., cancer as well as modulating (e.g., promoting or inhibiting) cell survival. Moreover, the immunoglobulin fusion proteins of the invention can be used as immunogens to produce antibodies in a subject, to purify ligands, and in screening assays to identify molecules that inhibit the interaction of a polypeptide of the invention with a ligand.

[0139] A chimeric or fusion protein of the invention can be produced by standard recombinant DNA techniques. For example, DNA fragments coding for the different polypeptide sequences are ligated together in-frame in accordance with conventional techniques, e.g., by employing blunt-ended or stagger-ended termini for ligation, restriction enzyme digestion to provide for appropriate termini, filling-in of cohesive ends as appropriate, alkaline phosphatase treatment to avoid undesirable joining, and enzymatic ligation. In another embodiment, the fusion gene can be synthesized by conventional techniques including automated DNA synthesizers. Alternatively, PCR amplification of gene fragments can be carried out using anchor primers that give rise to complementary overhangs between two consecutive gene fragments that can subsequently be annealed and reamplified to generate a chimeric gene sequence (see, for example, Ausubel et al. (eds.) CURRENT PROTOCOLS IN MOLECULAR BIOLOGY, John Wiley & Sons, 1992). Moreover, many expression vectors are commercially available that already encode a fusion moiety (e.g., a GST polypeptide). A nucleic acid encoding a polypeptide of the invention can be cloned into such an expression vector such that the fusion moiety is linked in-frame to the protein of the invention.

[0140] 4.8 Gene Therapy

[0141] Mutations in the polynucleotides of the invention gene may result in loss of normal function of the encoded protein. The invention thus provides gene therapy to restore normal activity of the polypeptides of the invention; or to treat disease states involving polypeptides of the invention. Delivery of a functional gene encoding polypeptides of the invention to appropriate cells is effected ex vivo, in situ, or in vivo by use of vectors, and more particularly viral vectors (e.g., adenovirus, adeno-associated virus, or a retrovirus), or ex vivo by use of physical DNA transfer methods (e.g., liposomes or chemical treatments). See, for example, Anderson, Nature, supplement to vol.392, no. 6679, pp.25-20 (1998). For additional reviews of gene therapy technology see Friedmann, Science, 244: 1275-1281 (1989); Verma, Scientific American: 68-84 (1990); and Miller, Nature, 357: 455-460 (1992). Introduction of any one of the nucleotides of the present invention or a gene encoding the polypeptides of the present invention can also be accomplished with extrachromosomal substrates (transient expression) or artificial chromosomes (stable expression). Cells may also be cultured ex vivo in the presence of proteins of the present invention in order to proliferate or to produce a desired effect on or activity in such cells. Treated cells can then be introduced in vivo for therapeutic purposes. Alternatively, it is contemplated that in other human disease states, preventing the expression of or inhibiting the activity of polypeptides of the invention will be useful in treating the disease states. It is contemplated that antisense therapy or gene therapy could be applied to negatively regulate the expression of polypeptides of the invention.

[0142] Other methods inhibiting expression of a protein include the introduction of antisense molecules to the nucleic acids of the present invention, their complements, or their translated RNA sequences, by methods known in the art. Further, the polypeptides of the present invention can be inhibited by using targeted deletion methods, or the insertion of a negative regulatory element such as a silencer, which is tissue specific.

[0143] The present invention still further provides cells genetically engineered in vivo to express the polynucleotides of the invention, wherein such polynucleotides are in operative association with a regulatory sequence heterologous to the host cell which drives expression of the polynucleotides in the cell. These methods can be used to increase or decrease the expression of the polynucleotides of the present invention.

[0144] Knowledge of DNA sequences provided by the invention allows for modification of cells to permit, increase, or decrease, expression of endogenous polypeptide. Cells can be modified (e.g., by homologous recombination) to provide increased polypeptide expression by replacing, in whole or in part, the naturally occurring promoter with all or part of a heterologous promoter so that the cells express the protein at higher levels. The heterologous promoter is inserted in such a manner that it is operatively linked to the desired protein encoding sequences. See, for example, PCT International Publication No. WO 94/12650, PCT International Publication No. WO 92/20808, and PCT International Publication No. WO 91/09955. It is also contemplated that, in addition to heterologous promoter DNA, amplifiable marker DNA (e.g., ada, dhfr, and the multifunctional CAD gene which encodes carbamyl phosphate synthase, aspartate transcarbamylase, and dihydroorotase) and/or intron DNA may be inserted along with the heterologous promoter DNA. If linked to the desired protein coding sequence, amplification of the marker DNA by standard selection methods results in co-amplification of the desired protein coding sequences in the cells.

[0145] In another embodiment of the present invention, cells and tissues may be engineered to express an endogenous gene comprising the polynucleotides of the invention under the control of inducible regulatory elements, in which case the regulatory sequences of the endogenous gene may be replaced by homologous recombination. As described herein, gene targeting can be used to replace a gene's existing regulatory region with a regulatory sequence isolated from a different gene or a novel regulatory sequence synthesized by genetic engineering methods. Such regulatory sequences may be comprised of promoters, enhancers, scaffold-attachment regions, negative regulatory elements, transcriptional initiation sites, regulatory protein binding sites or combinations of said sequences. Alternatively, sequences which affect the structure or stability of the RNA or protein produced may be replaced, removed, added, or otherwise modified by targeting. These sequences include polyadenylation signals, mRNA stability elements, splice sites, leader sequences for enhancing or modifying transport or secretion properties of the protein, or other sequences which alter or improve the function or stability of protein or RNA molecules.

[0146] The targeting event may be a simple insertion of the regulatory sequence, placing the gene under the control of the new regulatory sequence, e.g., inserting a new promoter or enhancer or both upstream of a gene. Alternatively, the targeting event may be a simple deletion of a regulatory element, such as the deletion of a tissue-specific negative regulatory element. Alternatively, the targeting event may replace an existing element; for example, a tissue-specific enhancer can be replaced by an enhancer that has broader or different cell-type specificity than the naturally occurring elements. Here, the naturally occurring sequences are deleted and new sequences are added. In all cases, the identification of the targeting event may be facilitated by the use of one or more selectable marker genes that are contiguous with the targeting DNA, allowing for the selection of cells in which the exogenous DNA has integrated into the cell genome. The identification of the targeting event may also be facilitated by the use of one or more marker genes exhibiting the property of negative selection, such that the negatively selectable marker is linked to the exogenous DNA, but configured such that the negatively selectable marker flanks the targeting sequence, and such that a correct homologous recombination event with sequences in the host cell genome does not result in the stable integration of the negatively selectable marker. Markers useful for this purpose include the Herpes Simplex Virus thyrnidine kinase (TK) gene or the bacterial xanthine-guanine phosphoribosyl-transferase (gpt) gene.

[0147] The gene targeting or gene activation techniques which can be used in accordance with this aspect of the invention are more particularly described in U.S. Pat. No. 5,272,071 to Chappel; U.S. Pat. No. 5,578,461 to Sherwin et al.; International Application No. PCT/US92/09627 (WO93/09222) by Selden et al.; and International Application No. PCT/US90/06436 (WO91/06667) by Skoultchi et al., each of which is incorporated by reference herein in its entirety.

[0148] 4.9 Transgenic Animals

[0149] In preferred methods to determine biological functions of the polypeptides of the invention in vivo, one or more genes provided by the invention are either over expressed or inactivated in the germ line of animals using homologous recombination [Capecchi, Science 244:1288-1292 (1989)]. Animals in which the gene is over expressed, under the regulatory control of exogenous or endogenous promoter elements, are known as transgenic animals. Animals in which an endogenous gene has been inactivated by homologous recombination are referred to as “knockout” animals. Knockout animals, preferably non-human mammals, can be prepared as described in U.S. Pat. No. 5,557,032, incorporated herein by reference. Transgenic animals are useful to determine the roles polypeptides of the invention play in biological processes, and preferably in disease states. Transgenic animals are useful as model systems to identify compounds that modulate lipid metabolism. Transgenic animals, preferably non-human mammals, are produced using methods as described in U.S. Pat. No 5,489,743 and PCT Publication No. WO94/28122, incorporated herein by reference.

[0150] Transgenic animals can be prepared wherein all or part of a promoter of the polynucleotidcs of the invention is either activated or inactivated to alter the level of expression of the polypeptides of the invention. Inactivation can be carried out using homologous recombination methods described above. Activation can be achieved by supplementing or even replacing the homologous promoter to provide for increased protein expression. The homologous promoter can be supplemented by insertion of one or more heterologous enhancer elements known to confer promoter activation in a particular tissue.

[0151] The polynucleotides of the present invention also make possible the development, through, e.g., homologous recombination or knock out strategies, of animals that fail to express polypeptides of the invention or that express a variant polypeptide. Such animals are useful as models for studying the in vivo activities of polypeptide as well as for studying modulators of the polypeptides of the invention.

[0152] In preferred methods to determine biological functions of the polypeptides of the invention in vivo, one or more genes provided by the invention are either over expressed or inactivated in the germ line of animals using homologous recombination [Capecchi, Science 244:1288-1292 (1989)]. Animals in which the gene is over expressed, under the regulatory control of exogenous or endogenous promoter elements, are known as transgenic animals. Animals in which an endogenous gene has been inactivated by homologous recombination are referred to as “knockout” animals. Knockout animals, preferably non-human mammals, can be prepared as described in U.S. Pat. No. 5,557,032, incorporated herein by reference. Transgenic animals are useful to determine the roles polypeptides of the invention play in biological processes, and preferably in disease states. Transgenic animals are useful as model systems to identify compounds that modulate lipid metabolism. Transgenic animals, preferably non-human mammals, are produced using methods as described in U.S. Pat. No 5,489,743 and PCT Publication No. WO94/28 122, incorporated herein by reference.

[0153] Transgenic animals can be prepared wherein all or part of the polynucleotides of the invention promoter is either activated or inactivated to alter the level of expression of the polypeptides of the invention. Inactivation can be carried out using homologous recombination methods described above. Activation can be achieved by supplementing or even replacing the homologous promoter to provide for increased protein expression. The homologous promoter can be supplemented by insertion of one or more heterologous enhancer elements known to confer promoter activation in a particular tissue.

[0154] 4.10 Uses and Biological Activity

[0155] The polynucleotides and proteins of the present invention are expected to exhibit one or more of the uses or biological activities (including those associated with assays cited herein) identified herein. Uses or activities described for proteins of the present invention may be provided by administration or use of such proteins or of polynucleotides encoding such proteins (such as, for example, in gene therapies or vectors suitable for introduction of DNA). The mechanism underlying the particular condition or pathology will dictate whether the polypeptides of the invention, the polynucleotides of the invention or modulators (activators or inhibitors) thereof would be beneficial to the subject in need of treatment. Thus, “therapeutic compositions of the invention” include compositions comprising isolated polynucleotides (including recombinant DNA molecules, cloned genes and degenerate variants thereof) or polypeptides of the invention (including full length protein, mature protein and truncations or domains thereof), or compounds and other substances that modulate the overall activity of the target gene products, either at the level of target gene/protein expression or target protein activity. Such modulators include polypeptides, analogs, (variants), including fragments and fusion proteins, antibodies and other binding proteins; chemical compounds that directly or indirectly activate or inhibit the polypeptides of the invention (identified, e.g., via drug screening assays as described herein); antisense polynucleotides and polynucleotides suitable for triple helix formation; and in particular antibodies or other binding partners that specifically recognize one or more epitopes of the polypeptides of the invention.

[0156] The polypeptides of the present invention may likewise be involved in cellular activation or in one of the other physiological pathways described herein.

[0157] 4.10.1 Research Uses and Utilities

[0158] The polynucleotides provided by the present invention can be used by the research community for various purposes The polynucleotides can be used to express recombinant protein for analysis, characterization or therapeutic use; as markers for tissues in which the corresponding protein is preferentially expressed (either constitutively or at a particular stage of tissue differentiation or development or in disease states); as molecular weight markers on gels; as chromosome markers or tags (when labeled) to identify chromosomes or to map related gene positions; to compare with endogenous DNA sequences in patients to identify potential genetic disorders; as probes to hybridize and thus discover novel, related DNA sequences; as a source of information to derive PCR primers for genetic fingerprinting; as a probe to “subtract-out” known sequences in the process of discovering other novel polynucleotides; for selecting and making oligomers for attachment to a “gene chip” or other support, including for examination of expression patterns; to raise anti-protein antibodies using DNA immunization techniques; and as an antigen to raise anti-DNA antibodies or elicit another immune response. Where the polynucleotide encodes a protein which binds or potentially binds to another protein (such as, for example, in a receptor-ligand interaction), the polynucleotide can also be used in interaction trap assays (such as, for example, that described in Gyuris et al., Cell 75:791-803 (1993)) to identify polynucleotides encoding the other protein with which binding occurs or to identify inhibitors of the binding interaction.

[0159] The polypeptides provided by the present invention can similarly be used in assays to determine biological activity, including in a panel of multiple proteins for high-throughput screening; to raise antibodies or to elicit another immune response; as a reagent (including the labeled reagent) in assays designed to quantitatively determine levels of the protein (or its receptor) in biological fluids; as markers for tissues in which the corresponding polypeptide is preferentially expressed (either constitutively or at a particular stage of tissue differentiation or development or in a disease state); and, of course, to isolate correlative receptors or ligands. Proteins involved in these binding interactions can also be used to screen for peptide or small molecule inhibitors or agonists of the binding interaction.

[0160] Any or all of these research utilities are capable of being developed into reagent grade or kit format for commercialization as research products.

[0161] Methods for performing the uses listed above are well known to those skilled in the art. References disclosing such methods include without limitation “Molecular Cloning: A Laboratory Manual”, 2d ed., Cold Spring Harbor Laboratory Press, Sambrook, J., E. F. Fritsch and T. Maniatis eds., 1989, and “Methods in Enzymology: Guide to Molecular Cloning Techniques”, Academic Press, Berger, S. L. and A. R. Kimmel eds., 1987.

[0162] 4.10.2 Nutritional Uses

[0163] Polynucleotides and polypeptides of the present invention can also be used as nutritional sources or supplements. Such uses include without limitation use as a protein or amino acid supplement, use as a carbon source, use as a nitrogen source and use as a source of carbohydrate. In such cases the polypeptide or polynucleotide of the invention can be added to the feed of a particular organism or can be administered as a separate solid or liquid preparation, such as in the form of powder, pills, solutions, suspensions or capsules. In the case of microorganisms, the polypeptide or polynucleotide of the invention can be added to the medium in or on which the microorganism is cultured.

[0164] 4.10.3 Cytokine and Cell Proliferation/Differentiation Activity

[0165] A polypeptide of the present invention may exhibit activity relating to cytokine, cell proliferation (either inducing or inhibiting) or cell differentiation (either inducing or inhibiting) activity or may induce production of other cytokines in certain cell populations. A polynucleotide of the invention can encode a polypeptide exhibiting such attributes. Many protein factors discovered to date, including all known cytokines, have exhibited activity in one or more factor-dependent cell proliferation assays, and hence the assays serve as a convenient confirmation of cytokine activity. The activity of therapeutic compositions of the present invention is evidenced by any one of a number of routine factor dependent cell proliferation assays for cell lines including, without limitation, 32D, DA2, DAIG, T10, B9, B9/11, BaF3, MC9/G, M+(preB M+), 2E8, RB5, DA1, 123, T1165, HT2, CTLL2, TF-1, Mo7e, CMK, HUVEC, and Caco. Therapeutic compositions of the invention can be used in the following:

[0166] Assays for T-cell or thymocyte proliferation include without limitation those described in: Current Protocols in Immunology, Ed by J. E. Coligan, A. M. Kruisbeek, D. H. Margulies, E. M. Shevach, W. Strober, Pub. Greene Publishing Associates and Wiley-Interscience (Chapter 3, In Vitro assays for Mouse Lyrnphocyte Function 3.1-3.19; Chapter 7, Immunologic studies in Humans); Talcai et al., J. Immunol. 137:3494-3500, 1986; Bertagnolli et al., J. Immunol. 145:1706-1712, 1990; Bertagnolli et al., Cellular Immunology 133:327-341, 1991; Bertagnolli, et al., I. Immunol. 149:3778-3783, 1992; Bowman et al., I. Immunol. 152:1756-1761, 1994.

[0167] Assays for cytokine production and/or proliferation of spleen cells, lymph node cells or thymocytes include, without limitation, those described in: Polyclonal T cell stimulation, Kruisbeek, A. M. and Shevach, E. M. In Current Protocols in Immunology. J. E. e.a. Coligan eds. Vol 1 pp.3.12.1-3.12.14, John Wiley and Sons, Toronto. 1994; and Measurement of mouse and human interleukin-y, Schreiber, R. D. In Current Protocols in Immunology. J. E. e.a. Coligan eds. Vol 1 pp. 6.8.1-6.8.8, John Wiley and Sons, Toronto. 1994.

[0168] Assays for proliferation and differentiation of hematopoietic and lymphopoietic cells include, without limitation, those described in: Measurement of Human and Murine Interleukin 2 and Interleukin 4, Bottomly, K., Davis, L. S. and Lipsky, P. E. In Current Protocols in Immunology. J. E. e.a. Coligan eds. Vol 1 pp. 6.3.1-6.3.12, John Wiley and Sons, Toronto. 1991; deVries et al., J. Exp. Med. 173:1205-1211, 1991; Moreau et al., Nature 336:690-692, 1988; Greenberger et al., Proc. Natl. Acad. Sci. U.S.A. 80:2931-2938, 1983; Measurement of mouse and human interleukin 6-Nordan, R. In Current Protocols in Immunology. J. E. Coligan eds. Vol 1 pp. 6.6.1-6.6.5, John Wiley and Sons, Toronto. 1991; Smith et al., Proc. Natl. Aced. Sci. U.S.A. 83:1857-1861, 1986; Measurement of human Interleukin 11-Bennett, F., Giannotti, J., Clark, S. C. and Turner, K. J. In Current Protocols in Immunology. J. E. Coligan eds. Vol 1 pp. 6.15.1 John Wiley and Sons, Toronto. 1991; Measurement of mouse and human Interleukin 9-Ciarletta, A., Giannotti, J., Clark, S. C. and Turner, K. J. In Current Protocols in Immunology. J. E. Coligan eds. Vol 1 pp. 6.13.1, John Wiley and Sons, Toronto. 1991.

[0169] Assays for T-cell clone responses to antigens (which will identify, among others, proteins that affect APC-T cell interactions as well as direct T-cell effects by measuring proliferation and cytokine production) include, without limitation, those described in: Current Protocols in Immunology, Ed by J. E. Coligan, A. M. Kruisbeek, D. H. Margulies, E. M. Shevach, W. Strober, Pub. Greene Publishing Associates and Wiley-Interscience (Chapter 3, In Vitro assays for Mouse Lymphocyte Function; Chapter 6, Cytokines and their cellular receptors; Chapter 7, Immunologic studies in Humans); Weinberger et al., Proc. Natl. Acad. Sci. USA 77:6091-6095, 1980; Weinberger et al., Eur. J. Immun. 11:405-411, 1981; Takai et al., J. Immunol. 137:3494-3500, 1986; Takai et al., J. Immunol. 140:508-512, 1988.

[0170] 4.10.4 Stem Cell Growth Factor Activity

[0171] A polypeptide of the present invention may exhibit stem cell growth factor activity and be involved in the proliferation, differentiation and survival of pluripotent and totipotent stem cells including primordial germ cells, embryonic stem cells, hematopoietic stem cells and/or germ line stem cells. Administration of the polypeptide of the invention to stem cells in vivo or ex vivo is expected to maintain and expand cell populations in a totipotential or pluripotential state which would be useful for re-engineering damaged or diseased tissues, transplantation, manufacture of bio-pharmaceuticals and the development of bio-sensors. The ability to produce large quantities of human cells has important working applications for the production of human proteins which currently must be obtained from non-human sources or donors, implantation of cells to treat diseases such as Parkinson's, Alzheimer's and other neurodegenerative diseases; tissues for grafting such as bone marrow, skin, cartilage, tendons, bone, muscle (including cardiac muscle), blood vessels, cornea, neural cells, gastrointestinal cells and others; and organs for transplantation such as kidney, liver, pancreas (including islet cells), heart and lung.

[0172] It is contemplated that multiple different exogenous growth factors and/or cytokines may be administered in combination with the polypeptide of the invention to achieve the desired effect, including any of the growth factors listed herein, other stem cell maintenance factors, and specifically including stem cell factor (SCF), leukemia inhibitory factor (LIF), Flt-3 ligand (Fit-3L), any of the interleukins, recombinant soluble IL-6 receptor fused to IL-6, macrophage inflammatory protein 1-alpha (MIP-1-alpha), G-CSF, GM-CSF, thrombopoietin (TPO), platelet factor 4 (PF4), platelet-derived growth factor (PDGF), neural growth factors and basic fibroblast growth factor (bFGF).

[0173] Since totipotent stem cells can give rise to virtually any mature cell type, expansion of these cells in culture will facilitate the production of large quantities of mature cells. Techniques for culturing stem cells are known in the art and administration of polypeptides of the invention, optionally with other growth factors and/or cytokines, is expected to enhance the survival and proliferation of the stem cell populations. This can be accomplished by direct administration of the polypeptide of the invention to the culture medium. Alternatively, stroma cells transfected with a polynucleotide that encodes for the polypeptide of the invention can be used as a feeder layer for the stem cell populations in culture or in vivo Stromal support cells for feeder layers may include embryonic bone marrow fibroblasts, bone marrow stromal cells, fetal liver cells, or cultured embryonic fibroblasts (see U.S. Pat. No. 5,690,926).

[0174] Stem cells themselves can be transfected with a polynucleotide of the invention to induce autocrine expression of the polypeptide of the invention. This will allow for generation of undifferentiated totipotential/pluripotential stem cell lines that are useful as is or that can then be differentiated into the desired mature cell types. These stable cell lines can also serve as a source of undifferentiated totipotential/pluripotential MRNA to create eDNA libraries and templates for polymerase chain reaction experiments. These studies would allow for the isolation and identification of differentially expressed genes in stem cell populations that regulate stem cell proliferation and/or maintenance.

[0175] Expansion and maintenance of totipotent stem cell populations will be useful in the treatment of many pathological conditions. For example, polypeptides of the present invention may be used to manipulate stem cells in culture to give rise to neuroepithelial cells that can be used to augment or replace cells damaged by illness, autoimmune disease, accidental damage or genetic disorders. The polypeptide of the invention may be useful for inducing the proliferation of neural cells and for the regeneration of nerve and brain tissue, i.e. for the treatment of central and peripheral nervous system diseases and neuropathies, as well as mechanical and traumatic disorders which involve degeneration, death or trauma to neural cells or nerve tissue. In addition, the expanded stem cell populations can also be genetically altered for gene therapy purposes and to decrease host rejection of replacement tissues after grafting or implantation.

[0176] Expression of the polypeptide of the invention and its effect on stem cells can also be manipulated to achieve controlled differentiation of the stem cells into more differentiated cell types. A broadly applicable method of obtaining pure populations of a specific differentiated cell type from undifferentiated stem cell populations involves the use of a cell-type specific promoter driving a selectable marker. The selectable marker allows only cells of the desired type to survive. For example, stem cells can be induced to differentiate into cardiomyocytes (Wobus et al., Differentiation, 48: 173-182, (1991); Klug et al., J. Clin. Invest., 98(1): 216-224, (1998)) or skeletal muscle cells (Browder, L. W. In: Principles of Tissue Engineering eds. Lanza et al., Academic Press (1997)). Alternatively, directed differentiation of stem cells can be accomplished by culturing the stem cells in the presence of a differentiation factor such as retinoic acid and an antagonist of the polypeptide of the invention which would inhibit the effects of endogenous stem cell factor activity and allow differentiation to proceed.

[0177] In vitro cultures of stem cells can be used to determine if the polypeptide of the invention exhibits stem cell growth factor activity. Stem cells are isolated from any one of various cell sources (including hematopoietic stem cells and embryonic stem cells) and cultured on a feeder layer, as described by Thompson et al. Proc. Natl. Acad. Sci, U.S.A., 92: 7844-7848 (1995), in the presence of the polypeptide of the invention alone or in combination with other growth factors or cytokines. The ability of the polypeptide of the invention to induce stem cells proliferation is determined by colony formation on semi-solid support e.g. as described by Bernstein et al., Blood, 77: 2316-2321 (1991).

[0178] 4.10.5 Hematopoiesis Regulating Activity

[0179] A polypeptide of the present invention may be involved in regulation of hematopoiesis and, consequently, in the treatment of myeloid or lymphoid cell disorders. Even marginal biological activity in support of colony forming cells or of factor-dependent cell lines indicates involvement in regulating hematopoiesis, e.g. in supporting the growth and proliferation of erythroid progenitor cells alone or in combination with other cytokines, thereby indicating utility, for example, in treating various anemias or for use in conjunction with irradiation/chemotherapy to stimulate the production of erythroid precursors and/or erythroid cells; in supporting the growth and proliferation of myeloid cells such as granulocytes and monocytes/macrophages (i.e., traditional CSF activity) useful, for example, in conjunction with chemotherapy to prevent or treat consequent myelo-suppression; in supporting the growth and proliferation of megakaryocytes and consequently of platelets thereby allowing prevention or treatment of various platelet disorders such as thrombocytopenia, and generally for use in place of or complimentary to platelet transfusions; and/or in supporting the growth and proliferation of hematopoietic stem cells which are capable of maturing to any and all of the above-mentioned hematopoietic cells and therefore find therapeutic utility in various stem cell disorders (such as those usually treated with transplantation, including, without limitation, aplastic anemia and paroxysmal nocturnal hemoglobinuria), as well as in repopulating the stem cell compartment post irradiation/chemotherapy, either in-vivo or ex-vivo (i.e., in conjunction with bone marrow transplantation or with peripheral progenitor cell transplantation (homologous or heterologous)) as normal cells or genetically manipulated for gene therapy.

[0180] Therapeutic compositions of the invention can be used in the following:

[0181] Suitable assays for proliferation and differentiation of various hematopoietic lines are cited above.

[0182] Assays for embryonic stem cell differentiation (which will identify, among others, proteins that influence embryonic differentiation hematopoiesis) include, without limitation, those described in: Johansson et al. Cellular Biology 15:141-151, 1995; Keller et al., Molecular and Cellular Biology 13:473486, 1993; McClanahan et al., Blood 81:2903-2915, 1993.

[0183] Assays for stem cell survival and differentiation (which will identify, among others, proteins that regulate lympho-hematopoiesis) include, without limitation, those described in: Methylcellulose colony forming assays, Freshney, M. G. In Culture of Hematopoietic Cells. R. I. Freshney, et al. eds. Vol pp.265-268, Wiley-Liss, Inc., New York, N.Y. 1994; Hirayama et al., Proc. Natl. Acad. Sci. USA 89:5907-5911, 1992; Primitive hematopoietic colony forming cells with high proliferative potential, McNiece, I. K. and Briddell, R. A. In Culture of Hematopoietic Cells. R. I. Freshney, et al. eds. Vol pp. 23-39, Wiley-Liss, Inc., New York, N.Y. 1994; Neben et al., Experimental Hematology 22:353-359, 1994; Cobblestone area forming cell assay, Ploemacher, R. E. In Culture of Hematopoietic Cells. R. I. Freshney, et al. eds. Vol pp. 1-21, Wiley-Liss, Inc., New York, N.Y. 1994; Long term bone marrow cultures in the presence of stromal cells, Spooncer, E., Dexter, M. and Allen, T. In Culture of Hematopoietic Cells. R. I. Freshney, et al. eds. Vol pp. 163-179, Wiley-Liss, Inc., New York, N.Y. 1994; Long term culture initiating cell assay, Sutherland, H. J. In Culture of Hematopoietic Cells. R. I. Freshney, et al. eds. Vol pp. 139-162, Wiley-Liss, Inc., New York, N.Y. 1994.

[0184] 4.10.6 Tissue Growth Activity

[0185] A polypeptide of the present invention also may be involved in bone, cartilage, tendon, ligament and/or nerve tissue growth or regeneration, as well as in wound healing and tissue repair and replacement, and in healing of burns, incisions and ulcers.

[0186] A polypeptide of the present invention which induces cartilage and/or bone growth in circumstances where bone is not normally formed, has application in the healing of bone fractures and cartilage damage or defects in humans and other animals. Compositions of a polypeptide, antibody, binding partner, or other modulator of the invention may have prophylactic use in closed as well as open fracture reduction and also in the improved fixation of artificial joints. De novo bone formation induced by an osteogenic agent contributes to the repair of congenital, trauma induced, or oncologic resection induced craniofacial defects, and also is useful in cosmetic plastic surgery.

[0187] A polypeptide of this invention may also be involved in attracting bone-forming cells, stimulating growth of bone-forming cells, or inducing differentiation of progenitors of bone-forming cells. Treatment of osteoporosis, osteoarhritis, bone degenerative disorders, or periodontal disease, such as through stimulation of bone and/or cartilage repair or by blocking inflammation or processes of tissue destruction (collagenase activity, osteoclast activity, etc.) mediated by inflammatory processes may also be possible using the composition of the invention.

[0188] Another category of tissue regeneration activity that may involve the polypeptide of the present invention is tendon/ligament formation. Induction of tendon/ligament-like tissue or other tissue formation in circumstances where such tissue is not normally formed, has application in the healing of tendon or ligament tears, deformities and other tendon or ligament defects in humans and other animals. Such a preparation employing a tendon/ligament-like tissue inducing protein may have prophylactic use in preventing damage to tendon or ligament tissue, as well as use in the improved fixation of tendon or ligament to bone or other tissues, and in repairing defects to tendon or ligament tissue. De novo tendon/ligament-like tissue formation induced by a composition of the present invention contributes to the repair of congenital, trauma induced, or other tendon or ligament defects of other origin, and is also useful in cosmetic plastic surgery for attachment or repair of tendons or ligaments. The compositions of the present invention may provide environment to attract tendon- or ligament-forming cells, stimulate growth of tendon- or ligament-forming cells, induce differentiation of progenitors of tendon- or ligament-forming cells, or induce growth of tendon/ligament cells or progenitors ex vivo for return in vivo to effect tissue repair. The compositions of the invention may also be useful in the treatment of tendinitis, carpal tunnel syndrome and other tendon or ligament defects. The compositions may also include an appropriate matrix and/or sequestering agent as a carrier as is well known in the art.

[0189] The compositions of the present invention may also be useful for proliferation of neural cells and for regeneration of nerve and brain tissue, i.e. for the treatment of central and peripheral nervous system diseases and neuropathies, as well as mechanical and traumatic disorders, which involve degeneration, death or trauma to neural cells or nerve tissue. More specifically, a composition may be used in the treatment of diseases of the peripheral nervous system, such as peripheral nerve injuries, peripheral neuropathy and localized neuropathies, and central nervous system diseases, such as Alzheimer's, Parkinson's disease, Huntington's disease, amyotrophic lateral sclerosis, and Shy-Drager syndrome. Further conditions which may be treated in accordance with the present invention include mechanical and traumatic disorders, such as spinal cord disorders, head trauma and cerebrovascular diseases such as stroke. Peripheral neuropathies resulting from chemotherapy or other medical therapies may also be treatable using a composition of the invention.

[0190] Compositions of the invention may also be useful to promote better or faster closure of non-healing wounds, including without limitation pressure ulcers, ulcers associated with vascular insufficiency, surgical and traumatic wounds, and the like.

[0191] Compositions of the present invention may also be involved in the generation or regeneration of other tissues, such as organs (including, for example, pancreas, liver, intestine, kidney, skin, endothelium), muscle (smooth, skeletal or cardiac) and vascular (including vascular endothelium) tissue, or for promoting the growth of cells comprising such tissues. Part of the desired effects may be by inhibition or modulation of fibrotic scarring may allow normal tissue to regenerate. A polypeptide of the present invention may also exhibit angiogenic activity.

[0192] A composition of the present invention may also be useful for gut protection or regeneration and treatment of lung or liver fibrosis, reperfusion injury in various tissues, and conditions resulting from systemic cytokine damage.

[0193] A composition of the present invention may also be useful for promoting or inhibiting differentiation of tissues described above from precursor tissues or cells; or for inhibiting the growth of tissues described above.

[0194] Therapeutic compositions of the invention can be used in the following:

[0195] Assays for tissue generation activity include, without limitation, those described in: International Patent Publication No. WO95/16035 (bone, cartilage, tendon); International Patent Publication No. WO95/05846 (nerve, neuronal); International Patent Publication No. WO91/07491 (skin, endothelium).

[0196] Assays for wound healing activity include, without limitation, those described in: Winter, Epidermal Wound Healing, pps. 71-112 (Maibach, H. I. and Rovee, D. T., eds.), Year Book Medical Publishers, Inc., Chicago, as modified by Eaglstein and Mertz, J. Invest. Dernatol 71:382-84 (1978).

[0197] 4.10.7 Immune Stimulating or Suppressing Activity

[0198] A polypeptide of the present invention may also exhibit immune stimulating or immune suppressing activity, including without limitation the activities for which assays are described herein. A polynucleotide of the invention can encode a polypeptide exhibiting such activities. A protein may be useful in the treatment of various immune deficiencies and disorders (including severe combined immunodeficiency (SCID)), e.g., in regulating (up or down) growth and proliferation of T and/or B lymphocytes, as well as effecting the cytolytic activity of NK cells and other cell populations. These immune deficiencies may be genetic or be caused by viral (e.g., HIV) as well as bacterial or fungal infections, or may result from autoimmune disorders. More specifically, infectious diseases causes by viral, bacterial, fungal or other infection may be treatable using a protein of the present invention, including infections by HIV, hepatitis viruses, herpes viruses, mycobacteria, Leishmania spp., malaria spp. and various fungal infections such as candidiasis. Of course, in this regard, proteins of the present invention may also be useful where a boost to the immune system generally may be desirable, i.e., in the treatment of cancer.

[0199] Autoimmune disorders which may be treated using a protein of the present invention include, for example, connective tissue disease, multiple sclerosis, systemic lupus erythematosus, rheumatoid arthritis, autoimmune pulmonary inflammation, Guillain-Barre syndrome, autoimmune thyroiditis, insulin dependent diabetes mellitis, myasthenia gravis, graft-versus-host disease and autoimmune inflammatory eye disease. Such a protein (or antagonists thereof, including antibodies) of the present invention may also to be useful in the treatment of allergic reactions and conditions (e.g., anaphylaxis, serum sickness, drug reactions, food allergies, insect venom allergies, mastocytosis, allergic rhinitis, hypersensitivity pneumonitis, urticaria, angioedema, eczema, atopic dermatitis, allergic contact dermatitis, erythema multiforme, Stevens-Johnson syndrome, allergic conjunctivitis, atopic keratoconjunctivitis, venereal keratoconjunctivitis, giant papillary conjunctivitis and contact allergies), such as asthma particularly allergic asthma) or other respiratory problems. Other conditions, in which immune suppression is desired (including, for example, organ transplantation), may also be treatable using a protein (or antagonists thereof) of the present invention. The therapeutic effects of the polypeptides or antagonists thereof on allergic reactions can be evaluated by in vivo animals models such as the cumulative contact enhancement test (Lastbom et al., Toxicology 125: 59-66, 1998), skin prick test (Hoffmann et al., Allergy 54: 446-54, 1999), guinea pig skin sensitization test (Vohr et al., Arch. Toxocol. 73: 501-9), and murine local lymph node assay (Kimber et al., J. Toxicol. Environ. Health 53: 563-79).

[0200] Using the proteins of the invention it may also be possible to modulate immune responses, in a number of ways. Down regulation may be in the form of inhibiting or blocking an immune response already in progress or may involve preventing the induction of an immune response. The functions of activated T cells may be inhibited by suppressing T cell responses or by inducing specific tolerance in T cells, or both. Immunosuppression of T cell responses is generally an active, non-antigen-specific, process which requires continuous exposure of the T cells to the suppressive agent. Tolerance, which involves inducing non-responsiveness or energy in T cells, is distinguishable from immunosuppression in that it is generally antigen-specific and persists after exposure to the tolerizing agent has ceased. Operationally, tolerance can be demonstrated by the lack of a T cell response upon reexposure to specific antigen in the absence of the tolerizing agent.

[0201] Down regulating or preventing one or more antigen functions (including without limitation B lymphocyte antigen functions (such as, for example, B7)), e.g., preventing high level lymphokine synthesis by activated T cells, will be useful in situations of tissue, skin and organ transplantation and in graft-versus-host disease (GVHD). For example, blockage of T cell function should result in reduced tissue destruction in tissue transplantation. Typically, in tissue transplants, rejection of the transplant is initiated through its recognition as foreign by T cells, followed by an immune reaction that destroys the transplant. The administration of a therapeutic composition of the invention may prevent cytokine synthesis by immune cells, such as T cells, and thus acts as an immunosuppressant Moreover, a lack of costimulation may also be sufficient to energize the T cells, thereby inducing tolerance in a subject. Induction of long-term tolerance by B lymphocyte antigen-blocking reagents may avoid the necessity of repeated administration of these blocking reagents. To achieve sufficient immunosuppression or tolerance in a subject, it may also be necessary to block the function of a combination of B lymphocyte antigens.

[0202] The efficacy of particular therapeutic compositions in preventing organ transplant rejection or GVHD can be assessed using animal models that are predictive of efficacy in humans. Examples of appropriate systems which can be used include allogeneic cardiac grafts in rats and xenogeneic pancreatic islet cell grafts in mice, both of which have been used to examine the immunosuppressive effects of CTLA4Ig fusion proteins in vivo as described in Lenschow et al., Science 257:789-792 (1992) and Turka et al., Proc. Natl. Acad. Sci USA, 89:11102-11105 (1992). In addition, murine models of GVHD (see Paul ed., Fundamental Immunology, Raven Press, New York, 1989, pp. 846-847) can be used to determine the effect of therapeutic compositions of the invention on the development of that disease.

[0203] Blocking antigen function may also be therapeutically useful for treating autoimmune diseases. Many autoimmune disorders are the result of inappropriate activation of T cells that are reactive against self tissue and which promote the production of cytokines and autoantibodies involved in the pathology of the diseases. Preventing the activation of autoreactive T cells may reduce or eliminate disease symptoms. Administration of reagents which block stimulation of T cells can be used to inhibit T cell activation and prevent production of autoantibodies or T cell-derived cytokines which may be involved in the disease process. Additionally, blocking reagents may induce antigen-specific tolerance of autoreactive T cells which could lead to long-term relief from the disease. The efficacy of blocking reagents in preventing or alleviating autoimmune disorders can be determined using a number of well-characterized animal models of human autoimmune diseases. Examples include murine experimental autoimmune encephalitis, systemic lupus erythmatosis in MRL/1pr/1pr mice or NZB hybrid mice, murine autoimmune collagen arthritis, diabetes mellitus in NOD mice and BB rats, and murine experimental myasthenia gravis (see Paul ed., Fundamental Immunology, Raven Press, New York, 1989, pp. 840-856).

[0204] Up regulation of an antigen function (e.g., a B lymphocyte antigen function), as a means of up regulating immune responses, may also be useful in therapy. Up regulation of immune responses may be in the form of enhancing an existing immune response or eliciting an initial immune response. For example, enhancing an immune response may be useful in cases of viral infection, including systemic viral diseases such as influenza, the common cold, and encephalitis.

[0205] Alternatively, anti-viral immune responses may be enhanced in an infected patient by removing T cells from the patient, costimulating the T cells in vitro with viral antigen-pulsed APCs either expressing a peptide of the present invention or together with a stimulatory form of a soluble peptide of the present invention and reintroducing the in vitro activated T cells into the patient Another method of enhancing anti-viral immune responses would be to isolate infected cells from a patient, transfect them with a nucleic acid encoding a protein of the present invention as described herein such that the cells express all or a portion of the protein on their surface, and reintroduce the transfected cells into the patient. The infected cells would now be capable of delivering a costimulatory signal to, and thereby activate, T cells in vivo.

[0206] A polypeptide of the present invention may provide the necessary stimulation signal to T cells to induce a T cell mediated immune response against the transfected tumor cells. In addition, tumor cells which lack MHC class I or MHC class II molecules, or which fail to reexpress sufficient mounts of MHC class I or MHC class II molecules, can be transfected with nucleic acid encoding all or a portion of (e.g., a cytoplasmic-domain truncated portion) of an MHC class I alpha chain protein and β₂ microglobulin protein or an MHC class II alpha chain protein and an MHC class II beta chain protein to thereby express MHC class I or MHC class II proteins on the cell surface. Expression of the appropriate class I or class II MHC in conjunction with a peptide having the activity of a B lymphocyte antigen (e.g., B7-1, B7-2, B7-3) induces a T cell mediated immune response against the transfected tumor cell. Optionally, a gene encoding an antisense construct which blocks expression of an MHC class II associated protein, such as the invariant chain, can also be cotransfected with a DNA encoding a peptide having the activity of a B lymphocyte antigen to promote presentation of tumor associated antigens and induce tumor specific immunity. Thus, the induction of a T cell mediated immune response in a human subject may be sufficient to overcome tumor-specific tolerance in the subject.

[0207] The activity of a protein of the invention may, among other means, be measured by the following methods:

[0208] Suitable assays for thymocyte or splenocyte cytotoxicity include, without limitation, those described in: Current Protocols in Immunology, Ed by J. E. Coligan, A. M. Kruisbeek, D. H. Margulies, E. M. Shevach, W. Strober, Pub. Greene Publishing Associates and Wiley-Interscience (Chapter 3, In Vitro assays for Mouse Lymphocyte Function 3.1-3.19; Chapter 7, Immunologic studies in Humans); Herrmann et al., Proc. Natl. Acad. Sci. USA 78:2488-2492, 1981; Herrmann et al., J. Immunol. 128:1968-1974, 1982; Handa et al., J. Immunol. 135:1564-1572, 1985; Takai et al., I. Immunol. 137:3494-3500, 1986; Takai et al., J. Immunol. 140:508-512, 1988; Bowman et al., J. Virology 61:1992-1998; Bertagnolli et al., Cellular Immunology 133:327-341, 1991; Brown et al., J. Immunol. 153:3079-3092, 1994.

[0209] Assays for T-cell-dependent immunoglobulin responses and isotype switching (which will identify, among others, proteins that modulate T-cell dependent antibody responses and that affect Th1/Th2 profiles) include, without limitation, those described in: Maliszewski, J. Immunol. 144:3028-3033, 1990; and Assays for B cell function: In vitro antibody production, Mond, J. J. and Brunswick, M. In Current Protocols in Immunology. J. E. e.a Coligan eds. Vol 1 pp. 3.8.1-3.8.16, John Wiley and Sons, Toronto. 1994.

[0210] Mixed lymphocyte reaction (MLR) assays (which will identify, among others, proteins that generate predominantly Th1 and CTL responses) include, without limitation, those described in: Current Protocols in Immunology, Ed by J. E. Coligan, A. M. Kruisbeek, D. H. Margulies, E. M. Shevach, W. Strober, Pub. Greene Publishing Associates and Wiley-Interscience (Chapter 3, In Vitro assays for Mouse Lymphocyte Function 3.1-3.19; Chapter 7, Immunologic studies in Humans); Takai et al., J. Immunol. 137:3494-3500, 1986; Takai et al., J. Immunol. 140:508-512, 1988; Bertagnolli et al., J. Immunol. 149:3778-3783, 1992.

[0211] Dendritic cell-dependent assays (which will identify, among others, proteins expressed by dendritic cells that activate naive T-cells) include, without limitation, those described in: Guery et al., J. Immunol. 134:536-544, 1995; Inaba et al., Journal of Experimental Medicine 173:549-559, 1991; Macatonia et al., Journal of Immunology 154:5071-5079, 1995; Porgador et al., Journal of Experimental Medicine 182:255-260, 1995; Nair et al., Journal of Virology 67:4062-4069, 1993; Huang et al., Science 264:961-965, 1994; Macatonia et al., Journal of Experimental Medicine 169:1255-1264, 1989; Bhardwaj et al., Journal of Clinical Investigation 94:797-807, 1994; and Inaba et al., Journal of Experimental Medicine 172:631-640, 1990.

[0212] Assays for lymphocyte survival/apoptosis (which will identify, among others, proteins that prevent apoptosis after superantigen induction and proteins that regulate lymphocyte homeostasis) include, without limitation, those described in: Darzynkiewicz et al., Cytometry 13:795-808, 1992; Gorczyca et al., Leukemia 7:659-670, 1993; Gorczyca et al., Cancer Research 53:1945-1951, 1993; Itoh et al., Cell 66:233-243, 1991; Zacharchuk, Journal of Immunology 145:4037-4045, 1990; Zarnai et al., Cytometry 14:891-897, 1993; Gorczyca et al., International Journal of Oncology 1:639-648, 1992.

[0213] Assays for proteins that influence early steps of T-cell commitment and development include, without limitation, those described in: Anticaet al., Blood 84:111-117, 1994; Fine et al., Cellular Immunology 155:111-122, 1994; Galy et al., Blood 85:2770-2778, 1995; Toki et al., Proc. Nat. Acad Sci. USA 88:7548-7551, 1991.

[0214] 4.10.8 Activin/Inhibin Activity

[0215] A polypeptide of the present invention may also exhibit activin- or inhibin-related activities. A polynucleotide of the invention may encode a polypeptide exhibiting such characteristics. Inhibins are characterized by their ability to inhibit the release of follicle stimulating hormone (FSH), while activins and are characterized by their ability to stimulate the release of follicle stimulating hormone (FSH). Thus, a polypeptide of the present invention, alone or in heterodimers with a member of the inhibin family, may be useful as a contraceptive based on the ability of inhibins to decrease fertility in female mammals and decrease spermatogenesis in male mammals. Administration of sufficient amounts of other inhibins can induce infertility in these mammals. Alternatively, the polypeptide of the invention, as a homodimer or as a heterodimer with other protein subunits of the inhibin group, may be useful as a fertility inducing therapeutic, based upon the ability of activin molecules in stimulating FSH release from cells of the anterior pituitary. See, for example, U.S. Pat. No. 4,798,885. A polypeptide of the invention may also be useful for advancement of the onset of fertility in sexually immature mammals, so as to increase the lifetime reproductive performance of domestic animals such as, but not limited to, cows, sheep and pigs.

[0216] The activity of a polypeptide of the invention may, among other means, be measured by the following methods.

[0217] Assays for activin/inhibin activity include, without limitation, those described in: Vale et al., Endocrinology 91:562-572, 1972; Ling et al., Nature 321:779-782, 1986; Vale et al., Nature 321:776-779, 1986; Mason et al., Nature 318:659-663, 1985; Forage et al., Proc. Natl. Acad. Sci.-USA 83:3091-3095, 1986.

[0218] 4.10.9 Chemotactic/Chemokinetic Activity

[0219] A polypeptide of the present invention may be involved in chemotactic or chemokinetic activity for mammalian cells, including, for example, monocytes, fibroblasts, neutrophils, T-cells, mast cells, eosinophils, epithelial and/or endothelial cells. A polynucleotide of the invention can encode a polypeptide exhibiting such attributes. Chemotactic and chemokinetic receptor activation can be used to mobilize or attract a desired cell population to a desired site of action. Chemotactic or chemokinetic compositions (e.g. proteins, antibodies, binding partners, or modulators of the invention) provide particular advantages in treatment of wounds and other trauma to tissues, as well as in treatment of localized infections. For example, attraction of lymphocytes, monocytes or neutrophils to tumors or sites of infection may result in improved immune responses against the tumor or infecting agent.

[0220] A protein or peptide has chemotactic activity for a particular cell population if it can stimulate, directly or indirectly, the directed orientation or movement of such cell population. Preferably, the protein or peptide has the ability to directly stimulate directed movement of cells. Whether a particular protein has chemotactic activity for a population of cells can be readily determined by employing such protein or peptide in any known assay for cell chemotaxis.

[0221] Therapeutic compositions of the invention can be used in the following:

[0222] Assays for chemotactic activity (which will identify proteins that induce or prevent chemotaxis) consist of assays that measure the ability of a protein to induce the migration of cells across a membrane as well as the ability of a protein to induce the adhesion of one cell population to another cell population. Suitable assays for movement and adhesion include, without limitation, those described in: Current Protocols in Immunology, Ed by J. E. Coligan, A. M. Kruisbeek, D. H. Marguiles, E. M. Shevach, W. Strober, Pub. Greene Publishing Associates and Wiley-Interscience (Chapter 6.12, Measurement of alpha and beta Chemokines 6.12.1-6.12.28; Taub et al. J. Clin. Invest. 95:1370-1376, 1995; Lind et al. APMIS 103:140-146, 1995; Muller et al-Eur. J. Immunol. 25:1744-1748; Gruber et al. J. of Immunol. 152:5860-5867, 1994; Johnston et al. J. of Immunol. 153:1762-1768, 1994.

[0223] 4.10.10 Hemostatic and Thrombolytic Activity

[0224] A polypeptide of the invention may also be involved in hemostatis or thrombolysis or thrombosis. A polynucleotide of the invention can encode a polypeptide exhibiting such attributes Compositions may be useful in treatment of various coagulation disorders (including hereditary disorders, such as hemophilias) or to enhance coagulation and other hemostatic events in treating wounds resulting from trauma, surgery or other causes. A composition of the invention may also be useful for dissolving or inhibiting formation of thromboses and for treatment and prevention of conditions resulting therefrom (such as, for example, infarction of cardiac and central nervous system vessels (e.g., stroke).

[0225] Therapeutic compositions of the invention can be used in the following:

[0226] Assay for hemostatic and thrombolytic activity include, without limitation, those described in: Linet et al., J. Clin. Pharmacol. 26:131-140, 1986; Burdick et al., Thrombosis Res. 45:413-419, 1987; Humphrey et al., Fibrinolysis 5:71-79 (1991); Schaub, Prostaglandins 35:467474, 1988.

[0227] 4.10.11 Cancer Diagnosis and Therapy

[0228] Polypeptides of the invention may be involved in cancer cell generation, proliferation or metastasis. Detection of the presence or amount of polynucleotides or polypeptides of the invention may be useful for the diagnosis and/or prognosis of one or more types of cancer. For example, the presence or increased expression of a polynucleotide/polypeptide of the invention may indicate a hereditary risk of cancer, a precancerous condition, or an ongoing malignancy. Conversely, a defect in the gene or absence of the polypeptide may be associated with a cancer condition. Identification of single nucleotide polymorphisms associated with cancer or a predisposition to cancer may also be useful for diagnosis or prognosis.

[0229] Cancer treatments promote tumor regression by inhibiting tumor cell proliferation, inhibiting angiogenesis (growth of new blood vessels that is necessary to support tumor growth) and/or prohibiting metastasis by reducing tumor cell motility or invasiveness. Therapeutic compositions of the invention may be effective in adult and pediatric oncology including in solid phase tumors/malignancies, locally advanced tumors, human soft tissue sarcomas, metastatic cancer, including lymphatic metastases, blood cell malignancies including multiple myeloma, acute and chronic leukemias, and lymphomas, head and neck cancers including mouth cancer, larynx cancer and thyroid cancer, lung cancers including small cell carcinoma and non-small cell cancers, breast cancers including small cell carcinoma and ductal carcinoma, gastrointestinal cancers including esophageal cancer, stomach cancer, colon cancer, colorectal cancer and polyps associated with colorectal neoplasia, pancreatic cancers, liver cancer, urologic cancers including bladder cancer and prostate cancer, malignancies of the female genital tract including ovarian carcinoma, uterine (including endometrial) cancers, and solid tumor in the ovarian follicle, kidney cancers including renal cell carcinoma, brain cancers including intrinsic brain tumors, neuroblastoma, astrocytic brain tumors, gliomas, metastatic tumor cell invasion in the central nervous system, bone cancers including osteomas, skin cancers including malignant melanoma, tumor progression of human skin keratinocytes, squamous cell carcinoma, basal cell carcinoma, hemangiopericytoma and Karposi's sarcoma.

[0230] Polypeptides, polynucleotides, or modulators of polypeptides of the invention (including inhibitors and stimulators of the biological activity of the polypeptide of the invention) may be administered to treat cancer. Therapeutic compositions can be administered in therapeutically effective dosages alone or in combination with adjuvant cancer therapy such as surgery, chemotherapy, radiotherapy, thermotherapy, and laser therapy, and may provide a beneficial effect, e.g. reducing tumor size, slowing rate of tumor growth, inhibiting metastasis, or otherwise improving overall clinical condition, without necessarily eradicating the cancer.

[0231] The composition can also be administered in therapeutically effective amounts as a portion of an anti-cancer cocktail. An anti-cancer cocktail is a mixture of the polypeptide or modulator of the invention with one or more anti-cancer drugs in addition to a pharmaceutically acceptable carrier for delivery. The use of anti-cancer cocktails as a cancer treatment is routine. Anti-cancer drugs that are well known in the art and can be used as a treatment in combination with the polypeptide or modulator of the invention include: Actinomycin D, Aminoglutethimide, Asparaginase, Bleomycin, Busulfan, Carboplatin, Carmustine, Chlorambucil, Cisplatin (cis-DDP), Cyclophosphamide, Cytarabine HCl (Cytosine arabinoside), Dacarbazine, Dactinomycin, Daunorubicin HCl, Doxorubicin HCl, Estramustine phosphate sodium, Etoposide (V16 -213), Floxuridine, 5-Fluorouracil (5-Fu), Flutamide, Hydroxyurea (hydroxycarbamide), Ifosfamide, Interferon Alpha-2a, Interferon Alpha-2b, Leuprolide acetate (LHRH-releasing factor analog), Lomustine, Mechlorethamine HCl (nitrogen mustard), Melphalan, Mercaptopurine, Mesna, Methotrexate (MTX), Mitomycin, Mitoxantrone HCl, Octreotide, Plicamycin, Procarbazine HCl, Streptozocin, Tamoxifen citrate, Thioguanine, Thiotepa, Vinblastine sulfate, Vincristine sulfate, Amsacrine, Azacitidine, Hexarnethylmelamine, Interleukin-2, Mitoguazone, Pentostatin, Semustine, Teniposide, and Vindesine sulfate.

[0232] In addition, therapeutic compositions of the invention may be used for prophylactic treatment of cancer. There are hereditary conditions and/or environmental situations (e.g. exposure to carcinogens) known in the art that predispose an individual to developing cancers.

[0233] Under these circumstances, it may be beneficial to treat these individuals with therapeutically effective doses of the polypeptide of the invention to reduce the risk of developing cancers.

[0234] In vitro models can be used to determine the effective doses of the polypeptide of the invention as a potential cancer treatment. These in vitro models include proliferation assays of cultured tumor cells, growth of cultured tumor cells in soft agar (see Freshney, (1987) Culture of Animal Cells: A Manual of Basic Technique, Wily-Liss, New York, N.Y. Ch 18 and Ch 2 1), tumor systems in nude mice as described in Giovanella et al., J. Natl. Can. Inst., 52: 921-30 (1974), mobility and invasive potential of tumor cells in Boyden Chamber assays as described in Pilkington et al., Anticancer Res., 17: 4107-9 (1997), and angiogenesis assays such as induction of vascularization of the chick chorioallantoic membrane or induction of vascular endothelial cell migration as described in Ribatta et al., Intl. J. Dev. Biol., 40: 1189-97 (1999) and Li et al., Clin. Exp. Metastasis, 17:423-9 (1999), respectively. Suitable tumor cells lines are available, e.g. from American Type Tissue Culture Collection catalogs.

[0235] 4.10.12 Receptor/Ligand Activity

[0236] A polypeptide of the present invention may also demonstrate activity as receptor, receptor ligand or inhibitor or agonist of receptor/ligand interactions. A polynucleotide of the invention can encode a polypeptide exhibiting such characteristics. Examples of such receptors and ligands include, without limitation, cytokine receptors and their ligands, receptor kinases and their ligands, receptor phosphatases and their ligands, receptors involved in cell-cell interactions and their ligands (including without limitation, cellular adhesion molecules (such as selectins, integrins and their ligands) and receptor/ligand pairs involved in antigen presentation, antigen recognition and development of cellular and humoral immune responses. Receptors and ligands are also useful for screening of potential peptide or small molecule inhibitors of the relevant receptor/ligand interaction. A protein of the present invention (including, without limitation, fragments of receptors and ligands) may themselves be useful as inhibitors of receptor/ligand interactions.

[0237] The activity of a polypeptide of the invention may, among other means, be measured by the following methods:

[0238] Suitable assays for receptor-ligand activity include without limitation those described in: Current Protocols in Immunology, Ed by J. E. Coligan, A. M. Kruisbeek, D. H. Margulies, E. M. Shevach, W. Strober, Pub. Greene Publishing Associates and Wiley- Interscience (Chapter 7.28, Measurement of Cellular Adhesion under static conditions 7.28.1-7.28.22), Takai et al., Proc. Natl. Acad. Sci. USA 84:6864-6868, 1987; Bierer et al., J. Exp. Med. 168:1145-1156, 1988; Rosenstein et al., J. Exp. Med. 169:149-160 1989; Stoltenborg et al., J. Immunol. Methods 175:59-68, 1994; Stitt et al., Cell 80:661-670, 1995.

[0239] By way of example, the polypeptides of the invention may be used as a receptor for a ligand(s) thereby transmitting the biological activity of that ligand(s). Ligands may be identified through binding assays, affinity chromatography, dihybrid screening assays, BIAcore assays, gel overlay assays, or other methods known in the art.

[0240] Studies characterizing drugs or proteins as agonist or antagonist or partial agonists or a partial antagonist require the use of other proteins as competing ligands. The polypeptides of the present invention or ligand(s) thereof may be labeled by being coupled to radioisotopes, calorimetric molecules or a toxin molecules by conventional methods. (“Guide to Protein Purification” Murray P. Deutscher (ed) Methods in Enzymology Vol. 182 (1990) Academic Press, Inc. San Diego). Examples of radioisotopes include, but are not limited to, tritium and carbon-14 . Examples of colorimetric molecules include, but are not limited to, fluorescent molecules such as fluorescamine, or rhodamine or other colorimetric molecules. Examples of toxins include, but are not limited, to ricin.

[0241] 4.10.13 Drug Screening

[0242] This invention is particularly useful for screening chemical compounds by using the novel polypeptides or binding fragments thereof in any of a variety of drug screening techniques. The polypeptides or fragments employed in such a test may either be free in solution, affixed to a solid support, borne on a cell surface or located intracellularly. One method of drug screening utilizes eukaryotic or prokaryotic host cells which are stably transformed with recombinant nucleic acids expressing the polypeptide or a fragment thereof. Drugs are screened against such transformed cells in competitive binding assays. Such cells, either in viable or fixed form, can be used for standard binding assays. One may measure, for example, the formation of complexes between polypeptides of the invention or fragments and the agent being tested or examine the diminution in complex formation between the novel polypeptides and an appropriate cell line, which are well known in the art.

[0243] Sources for test compounds that may be screened for ability to bind to or modulate (i.e., increase or decrease) the activity of polypeptides of the invention include (1) inorganic and organic chemical libraries, (2) natural product libraries, and (3) combinatorial libraries comprised of either random or mimetic peptides, oligonucleotides or organic molecules.

[0244] Chemical libraries may be readily synthesized or purchased from a number of commercial sources, and may include structural analogs of known compounds or compounds that are identified as “hits” or “leads” via natural product screening.

[0245] The sources of natural product libraries are microorganisms (including bacteria and fungi), animals, plants or other vegetation, or marine organisms, and libraries of mixtures for screening may be created by: (1) fermentation and extraction of broths from soil, plant or marine microorganisms or (2) extraction of the organisms themselves. Natural product libraries include polyketides, non-ribosomal peptides, and (non-naturally occurring) variants thereof For a review, see Science 282:63-68 (1998).

[0246] Combinatorial libraries are composed of large numbers of peptides, oligonucleotides or organic compounds and can be readily prepared by traditional automated synthesis methods, PCR, cloning or proprietary synthetic methods. Of particular interest are peptide and oligonucleotide combinatorial libraries. Still other libraries of interest include peptide, protein, peptidomimetic, multiparallel synthetic collection, recombinatorial, and polypeptide libraries. For a review of combinatorial chemistry and libraries created therefrom, see Myers, Curr. Opin. Biotechnol. 8:701-707 (1997). For reviews and examples of peptidomimetic libraries, see Al-Obeidi et al., Mol. Biotechnol, 9(3):205-23 (1998); Hruby et al., Curr Opin Chem Biol, 1(1):114-19 (1997); Domer et al., BioorgMed Chem, 4(5):709-15 (1996) (alkylated dipeptides).

[0247] Identification of modulators through use of the various libraries described herein permits modification of the candidate “hit” (or “lead”) to optimize the capacity of the “hit” to bind a polypeptide of the invention. The molecules identified in the binding assay are then tested for antagonist or agonist activity in in vivo tissue culture or animal models that are well known in the art. In brief, the molecules are titrated into a plurality of cell cultures or animals and then tested for either cell/animal death or prolonged survival of the animal/cells.

[0248] The binding molecules thus identified may be complexed with toxins, e.g., ricin or cholera, or with other compounds that are toxic to cells such as radioisotopes. The toxin-binding molecule complex is then targeted to a tumor or other cell by the specificity of the binding molecule for a polypeptide of the invention. Alternatively, the binding molecules may be complexed with imaging agents for targeting and imaging purposes.

[0249] 4.10.14 Assay for Receptor Activity

[0250] The invention also provides methods to detect specific binding of a polypeptide e.g. a ligand or a receptor. The art provides numerous assays particularly useful for identifying previously unknown binding partners for receptor polypeptides of the invention. For example, expression cloning using mammalian or bacterial cells, or dihybrid screening assays can be used to identify polynucleotides encoding binding partners. As another example, affinity chromatography with the appropriate immobilized polypeptide of the invention can be used to isolate polypeptides that recognize and bind polypeptides of the invention. There are a number of different libraries used for the identification of compounds, and in particular small molecules, that modulate (i.e., increase or decrease) biological activity of a polypeptide of the invention. Ligands for receptor polypeptides of the invention can also be identified by adding exogenous ligands, or cocktails of ligands to two cells populations that are genetically identical except for the expression of the receptor of the invention: one cell population expresses the receptor of the invention whereas the other does not. The response of the two cell populations to the addition of ligands(s) are then compared. Alternatively, an expression library can be co-expressed with the polypeptide of the invention in cells and assayed for an autocrine response to identify potential ligand(s). As still another example, BIAcore assays, gel overlay assays, or other methods known in the art can be used to identify binding partner polypeptides, including, (1) organic and inorganic chemical libraries, (2) natural product libraries, and (3) combinatorial libraries comprised of random peptides, oligonucleotides or organic molecules.

[0251] The role of downstream intracellular signaling molecules in the signaling cascade of the polypeptide of the invention can be determined. For example, a chimeric protein in which the cytoplasmic domain of the polypeptide of the invention is fused to the extracellular portion of a protein, whose ligand has been identified, is produced in a host cell. The cell is then incubated with the ligand specific for the extracellular portion of the chimeric protein, thereby activating the chimeric receptor. Known downstream proteins involved in intracellular signaling can then be assayed for expected modifications i.e. phosphorylation. Other methods known to those in the art can also be used to identify signaling molecules involved in receptor activity.

[0252] 4.10.15 Anti-Inflammatory Activity

[0253] Compositions of the present invention may also exhibit anti-inflammatory activity. The anti-inflammatory activity may be achieved by providing a stimulus to cells involved in the inflammatory response, by inhibiting or promoting cell-cell interactions (such as, for example, cell adhesion), by inhibiting or promoting chemotaxis of cells involved in the inflammatory process, inhibiting or promoting cell extravasation, or by stimulating or suppressing production of other factors which more directly inhibit or promote an inflammatory response. Compositions with such activities can be used to treat inflammatory conditions including chronic or acute conditions), including without limitation intimation associated with infection (such as septic shock, sepsis or systemic inflammatory response syndrome (SIRS)), ischemia-reperfusion injury, endotoxin lethality, arthritis, complement-mediated hyperacute rejection, nephritis, cytokine or chemokine-induced lung injury, inflammatory bowel disease, Crohn's disease or resulting from over production of cytokines such as TNF or IL-1. Compositions of the invention may also be useful to treat anaphylaxis and hypersensitivity to an antigenic substance or material. Compositions of this invention may be utilized to prevent or treat conditions such as, but not limited to, sepsis, acute pancreatitis, endotoxin shock, cytokine induced shock, rheumatoid arthritis, chronic inflammatory arthritis, pancreatic cell damage from diabetes mellitus type 1, graft versus host disease, inflammatory bowel disease, inflammation associated with pulmonary disease, other autoimmune disease or inflammatory disease, an antiproliferative agent such as for acute or chronic mylegenous leukemia or in the prevention of premature labor secondary to intrauterine infections.

[0254] 4.10.16 Leukemias

[0255] Leukemias and related disorders may be treated or prevented by administration of a therapeutic that promotes or inhibits function of the polynucleotides and/or polypeptides of the invention. Such leukemias and related disorders include but are not limited to acute leukemia, acute lymphocytic leukemia, acute myelocytic leukemia, myeloblastic, promyelocytic, myelomonocytic, monocytic, erythroleukemia, chronic leukemia, chronic myelocytic (granulocytic) leukemia and chronic lymphocytic leukemia (for a review of such disorders, see Fishman et al., 1985, Medicine, 2d Ed., J.B. Lippincott Co., Philadelphia).

[0256] 4.10.17 Nervous System Disorders

[0257] Nervous system disorders, involving cell types which can be tested for efficacy of intervention with compounds that modulate the activity of the polynucleotides and/or polypeptides of the invention, and which can be treated upon thus observing an indication of therapeutic utility, include but are not limited to nervous system injuries, and diseases or disorders which result in either a disconnection of axons, a diminution or degeneration of neurons, or demyelination. Nervous system lesions which may be treated in a patient (including human and non-human mammalian patients) according to the invention include but are not limited to the following lesions of either the central (including spinal cord, brain) or peripheral nervous systems:

[0258] (i) traumatic lesions, including lesions caused by physical injury or associated with surgery, for example, lesions which sever a portion of the nervous system, or compression injuries;

[0259] (ii) ischemic lesions, in which a lack of oxygen in a portion of the nervous system results in neuronal injury or death, including cerebral infarction or ischemia, or spinal cord infarction or ischemia;

[0260] (iii) infectious lesions, in which a portion of the nervous system is destroyed or injured as a result of infection, for example, by an abscess or associated with infection by human immunodeficiency virus, herpes zoster, or herpes simplex virus or with Lyme disease, tuberculosis, syphilis;

[0261] (iv) degenerative lesions, in which a portion of the nervous system is destroyed or injured as a result of a degenerative process including but not limited to degeneration associated with Parkinson's disease, Alzheimer's disease, Huntington's chorea, or amyotrophic lateral sclerosis;

[0262] (v) lesions associated with nutritional diseases or disorders, in which a portion of the nervous system is destroyed or injured by a nutritional disorder or disorder of metabolism including but not limited to, vitamin B12 deficiency, folic acid deficiency, Wernicke disease, tobacco-alcohol amblyopia, Marchiafava-Bignami disease (primary degeneration of the corpus callosum), and alcoholic cerebellar degeneration;

[0263] (vi) neurological lesions associated with systemic diseases including but not limited to diabetes (diabetic neuropathy, Bell's palsy), systemic lupus erythematosus, carcinoma, or sarcoidosis;

[0264] (vii) lesions caused by toxic substances including alcohol, lead, or particular neurotoxins; and

[0265] (viii) demyelinated lesions in which a portion of the nervous system is destroyed or injured by a demyelinating disease including but not limited to multiple sclerosis, human immunodeficiency virus-associated myelopathy, transverse myelopathy or various etiologies, progressive multifocal leukoencephalopathy, and central pontine myelinolysis.

[0266] Therapeutics which are useful according to the invention for treatment of a nervous system disorder may be selected by testing for biological activity in promoting the survival or differentiation of neurons. For example, and not by way of limitation, therapeutics which elicit any of the following effects may be useful according to the invention:

[0267] (i) increased survival time of neurons in culture;

[0268] (ii) increased sprouting of neurons in culture or in vivo;

[0269] (iii) increased production of a neuron-associated molecule in culture or in vivo, e.g., choline acetyltransferase or acetylcholinesterase with respect to motor neurons; or

[0270] (iv) decreased symptoms of neuron dysfunction in vivo.

[0271] Such effects may be measured by any method known in the art. In preferred, non-limiting embodiments, increased survival of neurons may be measured by the method set forth in Arakawa et al. (1990, J. Neurosci. 10:3507-3515); increased sprouting of neurons may be detected by methods set forth in Pestronk et al. (1980, Exp. Neurol. 70:65-82) or Brown et al. (1981, Ann. Rev. Neurosci. 4:1742); increased production of neuron-associated molecules may be measured by bioassay, enzymatic assay, antibody binding, Northern blot assay, etc., depending on the molecule to be measured; and motor neuron dysfunction may be measured by assessing the physical manifestation of motor neuron disorder, e.g., weakness, motor neuron conduction velocity, or functional disability.

[0272] In specific embodiments, motor neuron disorders that may be treated according to the invention include but are not limited to disorders such as infarction, infection, exposure to toxin, trauma, surgical damage, degenerative disease or malignancy that may affect motor neurons as well as other components of the nervous system, as well as disorders that selectively affect neurons such as amyotrophic lateral sclerosis, and including but not limited to progressive spinal muscular atrophy, progressive bulbar palsy, primary lateral sclerosis, infantile and juvenile muscular atrophy, progressive bulbar paralysis of childhood (Fazio-Londe syndrome), poliomyelitis and the post polio syndrome, and Hereditary Motorsensory Neuropathy (Charcot-Marie-Tooth Disease).

[0273] 4.10.18 Other Activities

[0274] A polypeptide of the invention may also exhibit one or more of the following additional activities or effects: inhibiting the growth, infection or function of, or killing, infectious agents, including, without limitation, bacteria, viruses, fungi and other parasites; effecting (suppressing or enhancing) bodily characteristics, including, without limitation, height, weight, hair color, eye color, skin, fat to lean ratio or other tissue pigmentation, or organ or body part size or shape (such as, for example, breast augmentation or diminution, change in bone form or shape); effecting biorhythms or circadian cycles or rhythms; effecting the fertility of male or female subjects; effecting the metabolism, catabolism, anabolism, processing, utilization, storage or elimination of dietary fat, lipid, protein, carbohydrate, vitamins, minerals, co-factors or other nutritional factors or component(s); effecting behavioral characteristics, including, without limitation, appetite, libido, stress, cognition (including cognitive disorders), depression (including depressive disorders) and violent behaviors; providing analgesic effects or other pain reducing effects; promoting differentiation and growth of embryonic stem cells in lineages other than hematopoietic lineages; hormonal or endocrine activity; in the case of enzymes, correcting deficiencies of the enzyme and treating deficiency-related diseases; treatment of hyperproliferative disorders (such as, for example, psoriasis); immunoglobulin-like activity (such as, for example, the ability to bind antigens or complement); and the ability to act as an antigen in a vaccine composition to raise an immune response against such protein or another material or entity which is cross-reactive with such protein.

[0275] 4.10.19 Identification of Polymorphisms

[0276] The demonstration of polymorphisms makes possible the identification of such polymorphisms in human subjects and the pharmacogenetic use of this information for diagnosis and treatment. Such polymorphisms may be associated with, e.g., differential predisposition or susceptibility to various disease states (such as disorders involving inflammation or immune response) or a differential response to drug administration, and this genetic information can be used to tailor preventive or therapeutic treatment appropriately. For example, the existence of a polymorphism associated with a predisposition to inflammation or autoimmune disease makes possible the diagnosis of this condition in humans by identifying the presence of the polymorphism.

[0277] Polymorphisms can be identified in a variety of ways known in the art which all generally involve obtaining a sample from a patient, analyzing DNA from the sample, optionally involving isolation or amplification of the DNA, and identifying the presence of the polymorphism in the DNA. For example, PCR may be used to amplify an appropriate fragment of genomic DNA which may then be sequenced. Alternatively, the DNA may be subjected to allele-specific oligonucleotide hybridization (in which appropriate oligonucleotides are hybridized to the DNA under conditions permitting detection of a single base mismatch) or to a single nucleotide extension assay (in which an oligonucleotide that hybridizes immediately adjacent to the position of the polymorphism is extended with one or more labeled nucleotides). In addition, traditional restriction fragment length polymorphism analysis (using restriction enzymes that provide differential digestion of the genomic DNA depending on the presence or absence of the polymorphism) may be performed. Arrays with nucleotide sequences of the present invention can be used to detect polymorphisms. The array can comprise modified nucleotide sequences of the present invention in order to detect the nucleotide sequences of the present invention. In the alternative, any one of the nucleotide sequences of the present invention can be placed on the array to detect changes from those sequences.

[0278] Alternatively a polymorphism resulting in a change in the amino acid sequence could also be detected by detecting a corresponding change in amino acid sequence of the protein, e.g., by an antibody specific to the variant sequence.

[0279] 4.10.20 Arthritis and Inflammation

[0280] The immunosuppressive effects of the compositions of the invention against rheumatoid arthritis is determined in an experimental animal model system. The experimental model system is adjuvant induced arthritis in rats, and the protocol is described by J. Holoshitz, et at., 1983, Science, 219:56, or by B. Waksman et al., 1963, Int. Arch. Allergy Appl. Immunol., 23:129. Induction of the disease can be caused by a single injection, generally intradermally, of a suspension of killed Mycobacterium tuberculosis in complete Freund's adjuvant (CFA). The route of injection can vary, but rats may be injected at the base of the tail with an adjuvant mixture. The polypeptide is administered in phosphate buffered solution (PBS) at a dose of about 1-5 mg/kg. The control consists of administering PBS only.

[0281] The procedure for testing the effects of the test compound would consist of intradermally injecting killed Mycobacterium tuberculosis in CFA followed by immediately administering the test compound and subsequent treatment every other day until day 24. At 14, 15, 18, 20, 22, and 24 days after injection of Mycobacterium CFA, an overall arthritis score may be obtained as described by J. Holoskitz above. An analysis. of the data would reveal that the test compound would have a dramatic affect on the swelling of the joints as measured by a decrease of the arthritis score.

[0282] 4.11 Therapeutic Methods

[0283] The compositions (including polypeptide fragments, analogs, variants and antibodies or other binding partners or modulators including antisense polynucleotides) of the invention have numerous applications in a variety of therapeutic methods. Examples of therapeutic applications include, but are not limited to, those exemplified herein.

### 4.11.1 EXAMPLE

[0284] One embodiment of the invention is the administration of an effective amount of the polypeptides or other composition of the invention to individuals affected by a disease or disorder that can be modulated by regulating the peptides of the invention. While the mode of administration is not particularly important, parenteral administration is preferred. An exemplary mode of administration is to deliver an intravenous bolus. The dosage of the polypeptides or other composition of the invention will normally be determined by the prescribing physician. It is to be expected that the dosage will vary according to the age, weight, condition and response of the individual patient. Typically, the amount of polypeptide administered per dose will be in the range of about 0.01 μg/kg to 100 mg/kg of body weight, with the preferred dose being about 0.0 μg/kg to 10 mg/kg of patient body weight. For parenteral administration, polypeptides of the invention will be formulated in an injectable form combined with a pharmaceutically acceptable parenteral vehicle. Such vehicles are well known in the art and examples include water, saline, Ringer's solution, dextrose solution, and solutions consisting of small amounts of the human serum albumin. The vehicle may contain minor amounts of additives that maintain the isotonicity and stability of the polypeptide or other active ingredient. The preparation of such solutions is within the skill of the art.

[0285] 4.12 Pharmaceutical Formulations and Routes of Administration

[0286] A protein or other composition of the present invention (from whatever source derived, including without limitation from recombinant and non-recombinant sources and including antibodies and other binding partners of the polypeptides of the invention) may be administered to a patient in need, by itself, or in pharmaceutical compositions where it is mixed with suitable carriers or excipient(s) at doses to treat or ameliorate a variety of disorders. Such a composition may optionally contain (in addition to protein or other active ingredient and a carrier) diluents, fillers, salts, buffers, stabilizers, solubilizers, and other materials well known in the art. The term “pharmaceutically acceptable” means a non-toxic material that does not interfere with the effectiveness of the biological activity of the active ingredient(s). The characteristics of the carrier will depend on the route of administration. The pharmaceutical composition of the invention may also contain cytokines, lymphokines, or other hematopoietic factors such as M-CSF, GM-CSF, TNF, IL-1, IL-2, IL-3, IL-4, IL-5, IL-6, IL-7, IL-8, IL-9, IL-10, IL-11, IL-12, IL-13, IL-14, IL-15, IFN, TNF0, TNF1, TNF2, G-CSF, Meg-CSF, thrombopoietin, stem cell factor, and erythropoietin. In further compositions, proteins of the invention may be combined with other agents beneficial to the treatment of the disease or disorder in question. These agents include various growth factors such as epidermal growth factor (EGF), platelet-derived growth factor (PDGF), transforming growth factors (TGF-α and TGF-β), insulin-like growth factor (IGF), as well as cytokines described herein.

[0287] The pharmaceutical composition may further contain other agents which either enhance the activity of the protein or other active ingredient or complement its activity or use in treatment. Such additional factors and/or agents may be included in the pharmaceutical composition to produce a synergistic effect with protein or other active ingredient of the invention, or to minimize side effects. Conversely, protein or other active ingredient of the present invention may be included in formulations of the particular clotting factor, cytokine, lymphokine, other hematopoietic factor, thrombolytic or anti-thrombotic factor, or anti-inflammatory agent to minimize side effects of the clotting factor, cytokine, lymphokine, other hematopoietic factor, thrombolytic or anti-thrombotic factor, or anti-inflammatory agent (such as IL-1Ra, IL-1 Hy1, IL-1 Hy2, anti-TNF, corticosteroids, immunosuppressive agents). A protein of the present invention may be active in multimers (e.g., heterodimers or homodimers) or complexes with itself or other proteins. As a result, pharmaceutical compositions of the invention may comprise a protein of the invention in such multimeric or complexed form.

[0288] As an alternative to being included in a pharmaceutical composition of the invention including a first protein, a second protein or a therapeutic agent may be concurrently administered with the first protein (e.g., at the same time, or at differing times provided that therapeutic concentrations of the combination of agents is achieved at the treatment site). Techniques for formulation arid administration of the compounds of the instant application may be found in “Remington's Pharmaceutical Sciences,” Mack Publishing Co., Easton, Pa., latest edition. A therapeutically effective dose further refers to that amount of the compound sufficient to result in amelioration of symptoms, e.g., treatment, healing, prevention or amelioration of the relevant medical condition, or an increase in rate of treatment, healing, prevention or amelioration of such conditions. When applied to an individual active ingredient, administered alone, a therapeutically effective dose refers to that ingredient alone. When applied to a combination, a therapeutically effective dose refers to combined amounts of the active ingredients that result in the therapeutic effect, whether administered in combination, serially or simultaneously.

[0289] In practicing the method of treatment or use of the present invention, a therapeutically effective amount of protein or other active ingredient of the present invention is administered to a mammal having a condition to be treated. Protein or other active ingredient of the present invention may be administered in accordance with the method of the invention either alone or in combination with other therapies such as treatments employing cytokines, lymphokines or other hematopoietic factors. When co-administered with one or more cytokines, lymphokines or other hematopoietic factors, protein or other active ingredient of the present invention may be administered either simultaneously with the cytokine(s), lymphokine(s), other hematopoietic factor(s), thrombolytic or anti-thrombotic factors, or sequentially. If administered sequentially, the attending physician will decide on the appropriate sequence of administering protein or other active ingredient of the present invention in combination with cytokine(s), lymphokine(s), other hematopoietic factor(s), thrombolytic or anti-thrombotic factors.

[0290] 4.12.1 Routes Of Administration

[0291] Suitable routes of administration may, for example, include oral, rectal, transmucosal, or intestinal administration; parenteral delivery, including intramuscular, subcutaneous, intramedullary injections, as well as intrathecal, direct intraventricular, intravenous, intraperitoneal, intranasal, or intraocular injections. Administration of protein or other active ingredient of the present invention used in the pharmaceutical composition or to practice the method of the present invention can be carried out in a variety of conventional ways, such as oral ingestion, inhalation, topical application or cutaneous, subcutaneous, intraperitoneal, parenteral or intravenous injection. Intravenous administration to the patient is preferred.

[0292] Alternately, one may administer the compound in a local rather than systemic manner, for example, via injection of the compound directly into a arthritic joints or in fibrotic tissue, often in a depot or sustained release formulation. In order to prevent the scarring process frequently occurring as complication of glaucoma surgery, the compounds may be administered topically, for example, as eye drops. Furthermore, one may administer the drug in a targeted drug delivery system, for example, in a liposome coated with a specific antibody, targeting, for example, arthritic or fibrotic tissue. The liposomes will be targeted to and taken up selectively by the afflicted tissue.

[0293] The polypeptides of the invention are administered by any route that delivers an effective dosage to the desired site of action. The determination of a suitable route of administration and an effective dosage for a particular indication is within the level of skill in the art. Preferably for wound treatment, one administers the therapeutic compound directly to the site. Suitable dosage ranges for the polypeptides of the invention can be extrapolated from these dosages or from similar studies in appropriate animal models. Dosages can then be adjusted as necessary by the clinician to provide maximal therapeutic benefit.

[0294] 4.12.2 Compositions/Formulations

[0295] Pharmaceutical compositions for use in accordance with the present invention thus may be formulated in a conventional manner using one or more physiologically acceptable carriers comprising excipients and auxiliaries which facilitate processing of the active compounds into preparations which can be used pharmaceutically. These pharmaceutical compositions may be manufactured in a manner that is itself known, e.g., by means of conventional mixing, dissolving, granulating, dragee-making, levigating, emulsifing, encapsulating, entrapping or lyophilizing processes. Proper formulation is dependent upon the route of administration chosen. When a therapeutically effective amount of protein or other active ingredient of the present invention is administered orally, protein or other active ingredient of the present invention will be in the form of a tablet, capsule, powder, solution or elixir. When administered in tablet form, the pharmaceutical composition of the invention may additionally contain a solid carrier such as a gelatin or an adjuvant. The tablet, capsule, and powder contain from about 5 to 95% protein or other active ingredient of the present invention, and preferably from about 25 to 90% protein or other active ingredient of the present invention. When administered in liquid form, a liquid carrier such as water, petroleum, oils of animal or plant origin such as peanut oil, mineral oil, soybean oil, or sesame oil, or synthetic oils may be added. The liquid form of the pharmaceutical composition may further contain physiological saline solution, dextrose or other saccharide solution, or glycols such as ethylene glycol, propylene glycol or polyethylene glycol. When administered in liquid form, the pharmaceutical composition contains from about 0.5 to 90% by weight of protein or other active ingredient of the present invention, and preferably from about 1 to 50% protein or other active ingredient of the present invention.

[0296] When a therapeutically effective amount of protein or other active ingredient of the present invention is administered by intravenous, cutaneous or subcutaneous injection, protein or other active ingredient of the present invention will be in the form of a pyrogen-free, parenterally acceptable aqueous solution. The preparation of such parenterally acceptable protein or other active ingredient solutions, having due regard to pH, isotonicity, stability, and the like, is within the skill in the art. A preferred pharmaceutical composition for intravenous, cutaneous, or subcutaneous injection should contain, in addition to protein or other active ingredient of the present invention, an isotonic vehicle such as Sodium Chloride Injection, Ringer's Injection, Dextrose Injection, Dextrose and Sodium Chloride Injection, Lactated Ringer's Injection, or other vehicle as known in the art. The pharmaceutical composition of the present invention may also contain stabilizers, preservatives, buffers, antioxidants, or other additives known to those of skill in the art. For injection, the agents of the invention may be formulated in aqueous solutions, preferably in physiologically compatible buffers such as Hanks's solution, Ringer's solution, or physiological saline buffer. For transmucosal administration, penetrants appropriate to the barrier to be permeated are used in the formulation. Such penetrants are generally known in the art.

[0297] For oral administration, the compounds can be formulated readily by combining the active compounds with pharmaceutically acceptable carriers well known in the art. Such carriers enable the compounds of the invention to be formulated as tablets, pills, dragees, capsules, liquids, gels, syrups, slurries, suspensions and the like, for oral ingestion by a patient to be treated. Pharmaceutical preparations for oral use can be obtained from a solid excipient, optionally grinding a resulting mixture, and processing the mixture of granules, after adding suitable auxiliaries, if desired, to obtain tablets or dragee cores. Suitable excipients are, in particular, fillers such as sugars, including lactose, sucrose, mannitol, or sorbitol; cellulose preparations such as, for example, maize starch, wheat starch, rice starch, potato starch, gelatin, gum tragacanth, methyl cellulose, hydroxypropylmethyl-cellulose, sodium carboxymethylcellulose, and/or polyvinylpyrrolidone (PVP). If desired, disintegrating agents may be added, such as the cross-linked polyvinyl pyrrolidone, agar, or alginic acid or a salt thereof such as sodium alginate. Dragee cores are provided with suitable coatings. For this purpose, concentrated sugar solutions may be used, which may optionally contain gum arabic, talc, polyvinyl pyrrolidone, carbopol gel, polyethylene glycol, and/or titanium dioxide, lacquer solutions, and suitable organic solvents or solvent mixtures. Dyestuff or pigments may be added to the tablets or dragee coatings for identification or to characterize different combinations of active compound doses.

[0298] Pharmaceutical preparations which can be used orally include push-fit capsules made of gelatin, as well as soft, sealed capsules made of gelatin and a plasticizer, such as glycerol or sorbitol. The push-fit capsules can contain the active ingredients in admixture with filler such as lactose, binders such as starches, and/or lubricants such as talc or magnesium stearate and, optionally, stabilizers. In soft capsules, the active compounds may be dissolved or suspended in suitable liquids, such as fatty oils, liquid paraffin, or liquid polyethylene glycols. In addition, stabilizers may be added. All formulations for oral administration should be in dosages suitable for such administration. For buccal administration, the compositions may take the form of tablets or lozenges formulated in conventional manner.

[0299] For administration by inhalation, the compounds for use according to the present invention are conveniently delivered in the form of an aerosol spray presentation from pressurized packs or a nebuliser, with the use of a suitable propellant, e.g., dichlorodifluoromethane, trichlorofluoromethane, dichlorotetrafluoroethane, carbon dioxide or other suitable gas. In the case of a pressurized aerosol the dosage unit may be determined by providing a valve to deliver a metered amount. Capsules and cartridges of, e.g., gelatin for use in an inhaler or insufflator may be formulated containing a powder mix of the compound and a suitable powder base such as lactose or starch. The compounds may be formulated for parenteral administration by injection, e.g., by bolus injection or continuous infusion. Formulations for injection may be presented in unit dosage form, e.g., in ampules or in multi-dose containers, with an added preservative. The compositions may take such forms as suspensions, solutions or emulsions in oily or aqueous vehicles, and may contain formulatory agents such as suspending, stabilizing and/or dispersing agents.

[0300] Pharmaceutical formulations for parenteral administration include aqueous solutions of the active compounds in water-soluble form. Additionally, suspensions of the active compounds may be prepared as appropriate oily injection suspensions. Suitable lipophilic solvents or vehicles include fatty oils such as sesame oil, or synthetic fatty acid esters, such as ethyl oleate or triglycerides, or liposomes. Aqueous injection suspensions may contain substances which increase the viscosity of the suspension, such as sodium carboxymethyl cellulose, sorbitol or dextran. Optionally, the suspension may also contain suitable stabilizers or agents which increase the solubility of the compounds to allow for the preparation of highly concentrated solutions. Alternatively, the active ingredient may be in powder form for constitution with a suitable vehicle, e.g., sterile pyrogen-free water, before use.

[0301] The compounds may also be formulated in rectal compositions such as suppositories or retention enemas, e.g., containing conventional suppository bases such as cocoa butter or other glycerides. In addition to the formulations described previously, the compounds may also be formulated as a depot preparation. Such long acting formulations may be administered by implantation (for example subcutaneously or intramuscularly) or by intramuscular injection. Thus, for example, the compounds may be formulated with suitable polymeric or hydrophobic materials (for example as an emulsion in an acceptable oil) or ion exchange resins, or as sparingly soluble derivatives, for example, as a sparingly soluble salt.

[0302] A pharmaceutical carrier for the hydrophobic compounds of the invention is a co-solvent system comprising benzyl alcohol, a nonpolar surfactant, a water-miscible organic polymer, and an aqueous phase. The co-solvent system may be the VPD co-solvent system. VPD is a solution of 3% w/v benzyl alcohol, 8% w/v of the nonpolar surfactant polysorbate 80, and 65% w/v polyethylene glycol 300, made up to volume in absolute ethanol. The VPD co-solvent system (VPD:5W) consists of VPD diluted 1:1 with a 5% dextrose in water solution. This co-solvent system dissolves hydrophobic compounds well, and itself produces low toxicity upon systemic administration. Naturally, the proportions of a co-solvent system may be varied considerably without destroying its solubility and toxicity characteristics. Furthermore, the identity of the co-solvent components may be varied: for example, other low-toxicity nonpolar surfactants may be used instead of polysorbate 80; the fraction size of polyethylene glycol may be varied; other biocompatible polymers may replace polyethylene glycol, e.g. polyvinyl pyrrolidone; and other sugars or polysaccharides may substitute for dextrose. Alternatively, other delivery systems for hydrophobic pharmaceutical compounds may be employee Liposomes and emulsions are well known examples of delivery vehicles or carriers for hydrophobic drugs Certain organic solvents such as dimethylsulfoxide also may be employed, although usually at the cost of greater toxicity. Additionally, the compounds may be delivered using a sustained-release system, such as semipermeable matrices of solid hydrophobic polymers containing the therapeutic agent. Various types of sustained-release materials have been established and are well known by those skilled in the art. Sustained-release capsules may, depending on their chemical nature, release the compounds for a few weeks up to over 100 days. Depending on the chemical nature and the biological stability of the therapeutic reagent, additional strategies for protein or other active ingredient stabilization may be employed.

[0303] The pharmaceutical compositions also may comprise suitable solid or gel phase carriers or excipients. Examples of such carriers or excipients include but are not limited to calcium carbonate, calcium phosphate, various sugars, starches, cellulose derivatives, gelatin, and polymers such as polyethylene glycols. Many of the active ingredients of the invention may be provided as salts with pharmaceutically compatible counter ions. Such pharmaceutically acceptable base addition salts are those salts which retain the biological effectiveness and properties of the free acids and which are obtained by reaction with inorganic or organic bases such as sodium hydroxide, magnesium hydroxide, ammonia, trialkylarnine, dialkylamine, monoalkylamine, dibasic amino acids, sodium acetate, potassium benzoate, triethanol amine and the like.

[0304] The pharmaceutical composition of the invention may be in the form of a complex of the protein(s) or other active ingredient(s) of present invention along with protein or peptide antigens. The protein and/or peptide antigen will deliver a stimulatory signal to both B and T lymphocytes. B lymphocytes will respond to antigen through their surface immunoglobulin receptor. T lymphocytes will respond to antigen through the T cell receptor (TCR) following presentation of the antigen by MHC proteins. MHC and structurally related proteins including those encoded by class I and class II MHC genes on host cells will serve to present the peptide antigen(s) to T lymphocytes. The antigen components could also be supplied as purified MHC-peptide complexes alone or with co-stimulatory molecules that can directly signal T cells. Alternatively antibodies able to bind surface immunoglobulin and other molecules on B cells as well as antibodies able to bind the TCR and other molecules on T cells can be combined with the pharmaceutical composition of the invention.

[0305] The pharmaceutical composition of the invention may be in the form of a liposome in which protein of the present invention is combined, in addition to other pharmaceutically acceptable carriers, with amphipathic agents such as lipids which exist in aggregated form as micelles, insoluble monolayers, liquid crystals, or lamellar layers in aqueous solution. Suitable lipids for liposomal formulation include, without limitation, monoglycerides, diglycerides, sulfatides, lysolecithins, phospholipids, saponin, bile acids, and the like. Preparation of such liposomal formulations is within the level of skill in the art, as disclosed, for example, in U.S. Pat. Nos. 4,235,871; 4,501,728; 4,837,028; and 4,737,323, all of which are incorporated herein by reference.

[0306] The amount of protein or other active ingredient of the present invention in the pharmaceutical composition of the present invention will depend upon the nature and severity of the condition being treated, and on the nature of prior treatments which the patient has undergone. Ultimately, the attending physician will decide the amount of protein or other active ingredient of the present invention with which to treat each individual patient. Initially, the attending physician will administer low doses of protein or other active ingredient of the present invention and observe the patient's response. Larger doses of protein or other active ingredient of the present invention may be administered until the optimal therapeutic effect is obtained for the patient, and at that point the dosage is not increased further. It is contemplated that the various pharmaceutical compositions used to practice the method of the present invention should contain about 0.01 μg to about 100 mg (preferably about 0.1 μg to about 10 mg, more preferably about 0.1 μg to about 1 mg) of protein or other active ingredient of the present invention per kg body weight. For compositions of the present invention which are useful for bone, cartilage, tendon or ligament regeneration, the therapeutic method includes administering the composition topically, systematically, or locally as an implant or device. When administered, the therapeutic composition for use in this invention is, of course, in a pyrogen-free, physiologically acceptable form. Further, the composition may desirably be encapsulated or injected in a viscous form for delivery to the site of bone, cartilage or tissue damage. Topical administration may be suitable for wound healing and tissue repair. Therapeutically useful agents other than a protein or other active ingredient of the invention which may also optionally be included in the composition as described above, may alternatively or additionally, be administered simultaneously or sequentially with the composition in the methods of the invention. Preferably for bone and/or cartilage formation, the composition would include a matrix capable of delivering the protein-containing or other active ingredient-containing composition to the site of bone and/or cartilage damage, providing a structure for the developing bone and cartilage and optimally capable of being resorbed into the body. Such matrices may be formed of materials presently in use for other implanted medical applications.

[0307] The choice of matrix material is based on biocompatibility, biodegradability, mechanical properties, cosmetic appearance and interface properties. The particular application of the compositions will define the appropriate formulation. Potential matrices for the compositions may be biodegradable and chemically defined calcium sulfate, tricalcium phosphate, hydroxyapatite, polylactic acid, polyglycolic acid and polyanhydrides. Other potential materials are biodegradable and biologically well-defined, such as bone or dermal collagen. Further matrices are comprised of pure proteins or extracellular matrix components. Other potential matrices are nonbiodegradable and chemically defined, such as sintered hydroxyapatite, bioglass, aluminates, or other ceramics. Matrices may be comprised of combinations of any of the above mentioned types of material, such as polylactic acid and hydroxyapatite or collagen and tricalcium phosphate. The bioceramics may be altered in composition, such as in calcium-aluminate-phosphate and processing to alter pore size, particle size, particle shape, and biodegradability. Presently preferred is a 50:50 (mole weight) copolymer of lactic acid and glycolic acid in the form of porous particles having diameters ranging from 150 to 800 microns. In some applications, it will be useful to utilize a sequestering agent, such as carboxymethyl cellulose or autologous blood clot, to prevent the protein compositions from disassociating from the matrix.

[0308] A preferred family of sequestering agents is cellulosic materials such as alkylcelluloses (including hydroxyalkylcelluloses), including methylcellulose, ethylcellulose, hydroxyethylcellulose, hydroxypropylcellulose, hydroxypropyl-methylcellulose, and carboxymethylcellulose, the most preferred being cationic salts of carboxymethylcellulose (CMC). Other preferred sequestering agents include hyaluronic acid, sodium alginate, poly(ethylene glycol), polyoxyethylene oxide, carboxyvinyl polymer and poly(vinyl alcohol). The amount of sequestering agent useful herein is 0.5-20 wt %, preferably 1-10 wt % based on total formulation weight, which represents the amount necessary to prevent desorption of the protein from the polymer matrix and to provide appropriate handling of the composition, yet not so much that the progenitor cells are prevented from infiltrating the matrix, thereby providing the protein the opportunity to assist the osteogenic activity of the progenitor cells. In further compositions, proteins or other active ingredients of the invention may be combined with other agents beneficial to the treatment of the bone and/or cartilage defect, wound, or tissue in question. These agents include various growth factors such as epidermal growth factor (EGF), platelet derived growth factor (PDGF), transforming growth factors (TGF-α and TGF-β), and insulin-like growth factor (IGF).

[0309] The therapeutic compositions are also presently valuable for veterinary applications. Particularly domestic animals and thoroughbred horses, in addition to humans, are desired patients for such treatment with proteins or other active ingredients of the present invention. The dosage regimen of a protein-containing pharmaceutical composition to be used in tissue regeneration will be determined by the attending physician considering various factors which modify the action of the proteins, e.g., amount of tissue weight desired to be formed, the site of damage, the condition of the damaged tissue, the size of a wound, type of damaged tissue (e.g., bone), the patients age, sex, and diet, the severity of any infection, time of administration and other clinical factors. The dosage may vary with the type of matrix used in the reconstitution and with inclusion of other proteins in the pharmaceutical composition. For example, the addition of other known growth factors, such as IGF I (insulin like growth factor I), to the final composition, may also effect the dosage. Progress can be monitored by periodic assessment of tissue/bone growth and/or repair, for example, X-rays, histomorphometric determinations and tetracycline labeling.

[0310] Polynucleotides of the present invention can also be used for gene therapy. Such polynucleotides can be introduced either in vivo or ex vivo into cells for expression in a mammalian subject. Polynucleotides of the invention may also be administered by other known methods for introduction of nucleic acid into a cell or organism (including, without limitation, in the form of viral vectors or naked DNA). Cells may also be cultured ex vivo in the presence of proteins of the present invention in order to proliferate or to produce a desired effect on or activity in such cells. Treated cells can then be introduced in vivo for therapeutic purposes.

[0311] 4.12.3 Effective Dosage

[0312] Pharmaceutical compositions suitable for use in the present invention include compositions wherein the active ingredients are contained in an effective amount to achieve its intended purpose. More specifically, a therapeutically effective amount means an amount effective to prevent development of or to alleviate the existing symptoms of the subject being treated. Determination of the effective amount is well within the capability of those skilled in the art, especially in light of the detailed disclosure provided herein. For any compound used in the method of the invention, the therapeutically effective dose can be estimated initially from appropriate in vitro assays. For example, a dose can be formulated in animal models to achieve a circulating concentration range that can be used to more accurately determine useful doses in humans. For example, a dose can be formulated in animal models to achieve a circulating concentration range that includes the IC₅₀ as determined in cell culture (i.e., the concentration of the test compound which achieves a half-maximal inhibition of the protein's biological activity). Such information can be used to more accurately determine useful doses in humans.

[0313] A therapeutically effective dose refers to that amount of the compound that results in amelioration of symptoms or a prolongation of survival in a patient. Toxicity and therapeutic efficacy of such compounds can be determined by standard pharmaceutical procedures in cell cultures or experimental animals, e.g., for determining the LD₅₀ (the dose lethal to 50% of the population) and the ED₅₀ (the dose therapeutically effective in 50% of the population). The dose ratio between toxic and therapeutic effects is the therapeutic index and it can be expressed as the ratio between LD₅₀ and ED₅₀. Compounds which exhibit high therapeutic indices are preferred. The data obtained from these cell culture assays and animal studies can be used in formulating a range of dosage for use in human. The dosage of such compounds lies preferably within a range of circulating concentrations that include the ED₅₀ with little or no toxicity. The dosage may vary within this range depending upon the dosage form employed and the route of administration utilized. The exact formulation, route of administration and dosage can be chosen by the individual physician in view of the patient's condition. See, e.g., Fingl et al., 1975, in “The Pharmacological Basis of Therapeutics”, Ch. 1 p.1. Dosage amount and interval may be adjusted individually to provide plasma levels of the active moiety which are sufficient to maintain the desired effects, or minimal effective concentration (MEC). The MEC will vary for each compound but can be estimated from in vitro data. Dosages necessary to achieve the MEC will depend on individual characteristics and route of administration. However, HPLC assays or bioassays can be used to determine plasma concentrations.

[0314] Dosage intervals can also be determined using MEC value. Compounds should be administered using a regimen which maintains plasma levels above the MEC for 10-90% of the time, preferably between 30-90% and most preferably between 50-90%. In cases of local administration or selective uptake, the effective local concentration of the drug may not be related to plasma concentration.

[0315] An exemplary dosage regimen for polypeptides or other compositions of the invention will be in the range of about 0.01 μg/kg to 100 mg/kg of body weight daily, with the preferred dose being about 0.1 μg/kg to 25 mg/kg of patient body weight daily, varying in adults and children. Dosing may be once daily, or equivalent doses may be delivered at longer or shorter intervals.

[0316] The amount of composition administered will, of course, be dependent on the subject being treated, on the subject's age and weight, the severity of the affliction, the manner of administration and the judgment of the prescribing physician.

[0317] 4.12.4 Packaging

[0318] The compositions may, if desired, be presented in a pack or dispenser device which may contain one or more unit dosage forms containing the active ingredient. The pack may, for example, comprise metal or plastic foil, such as a blister pack. The pack or dispenser device may be accompanied by instructions for administration. Compositions comprising a compound of the invention formulated in a compatible pharmaceutical carrier may also be prepared, placed in an appropriate container, and labeled for treatment of an indicated condition.

[0319] 4.13 Antibodies

[0320] Also included in the invention are antibodies to proteins, or fragments of proteins of the invention. The term “antibody” as used herein refers to immunoglobulin molecules and immunologically active portions of immunoglobulin (1g) molecules, i.e., molecules that contain an antigen binding site that specifically binds (immunoreacts with) an antigen. Such antibodies include, but are not limited to, polyclonal, monoclonal, chimeric, single chain, F_{ab}, F_{ab}′ and F_{(ab)2} fragments, and an F_{ab} expression library. In general, an antibody molecule obtained from humans relates to any of the classes IgG, IgM, IgA, IgE and IgD, which differ from one another by the nature of the heavy chain present in the molecule. Certain classes have subclasses as well, such as IgG₁, IgG₂, and others. Furthermore, in humans, the light chain may be a kappa chain or a lambda chain. Reference herein to antibodies includes a reference to all such classes, subclasses and types of human antibody species.

[0321] An isolated related protein of the invention may be intended to serve as an antigen, or a portion or fragment thereof, and additionally can be used as an immunogen to generate antibodies that immunospecifically bind the antigen, using standard techniques for polyclonal and monoclonal antibody preparation. The full-length protein can be used or, alternatively, the invention provides antigenic peptide fragments of the antigen for use as inmmunogens. An antigenic peptide fragment comprises at least 6 amino acid residues of the amino acid sequence of the full length protein, such as an amino acid sequence shown in SEQ ID NO: 173, and encompasses an epitope thereof such that an antibody raised against the peptide forms a specific immune complex with the full length protein or with any fragment that contains the epitope. Preferably, the antigenic peptide comprises at least 10 amino acid residues, or at least 15 amino acid residues, or at least 20 amino acid residues, or at least 30 amino acid residues. Preferred epitopes encompassed by the antigenic peptide are regions of the protein that are located on its surface; commonly these are hydrophilic regions.

[0322] In certain embodiments of the invention, at least one epitope encompassed by the antigenic peptide is a region of related protein that is located on the surface of the protein, e.g., a hydrophilic region. A hydrophobicity analysis of the human related protein sequence will indicate which regions of a related protein are particularly hydrophilic and, therefore, are likely to encode surface residues useful for targeting antibody production. As a means for targeting antibody production, hydropathy plots showing regions of hydrophilicity and hydrophobicity may be generated by any method well known in the art, including, for example, the Kyte Doolittle or the Hopp Woods methods, either with or without Fourier transformation. See, e.g., Hopp and Woods, 1981, Proc. Nat. Acad Sci. USA 78: 3824-3828; Kyte and Doolittle 1982, J. Mol. Biol. 157: 105-142, each of which is incorporated herein by reference in its entirety. Antibodies that are specific for one or more domains within an antigenic protein, or derivatives, fragments, analogs or homologs thereof, are also provided herein.

[0323] A protein of the invention, or a derivative, fragment, analog, homolog or ortholog thereof, may be utilized as an immunogen in the generation of antibodies that immunospecifically bind these protein components.

[0324] Various procedures known within the art may be used for the production of polyclonal or monoclonal antibodies directed against a protein of the invention, or against derivatives, fragments, analogs homologs or orthologs thereof (see, for example, Antibodies: A Laboratory Manual, Harlow E, and Lane D, 1988, Cold Spring Harbor Laboratory Press, Cold Spring Harbor, N.Y., incorporated herein by reference). Some of these antibodies are discussed below.

[0325] 4.13.1 Polyclonal Antibodies

[0326] For the production of polyclonal antibodies, various suitable host animals (e.g., rabbit, goat, mouse or other mammal) may be immunized by one or more injections with the native protein, a synthetic variant thereof, or a derivative of the foregoing. An appropriate immunogenic preparation can contain, for example, the naturally occurring immunogenic protein, a chemically synthesized polypeptide representing the immunogenic protein, or a recombinantly expressed immunogenic protein. Furthermore, the protein may be conjugated to a second protein known to be immunogenic in the mammal being immunized. Examples of such immunogenic proteins include but are not limited to keyhole limpet hemocyanin, serum albumin, bovine thyroglobulin, and soybean trypsin inhibitor. The preparation can further include an adjuvant. Various adjuvants used to increase the immunological response include, but are not limited to, Freund's (complete and incomplete), mineral gels (e.g., aluminum hydroxide), surface active substances (e.g., lysolecithin, pluronic polyols, polyanions, peptides, oil emulsions, dinitrophenol, etc.), adjuvants usable in humans such as Bacille Calmette-Guerin and Corynebacterium parvum, or similar immunostimulatory agents. Additional examples of adjuvants which can be employed include MPL-TDM adjuvant (monophosphoryl Lipid A, synthetic trehalose dicorynomycolate).

[0327] The polyclonal antibody molecules directed against the immunogenic protein can be isolated from the mammal (e.g., from the blood) and further purified by well known techniques, such as affinity chromatography using protein A or protein G, which provide primarily the IgG fraction of immune serum. Subsequently, or alternatively, the specific antigen which is the target of the immunoglobulin sought, or an epitope thereof, may be immobilized on a column to purify the immune specific antibody by immunoaffinity chromatography. Purification of immunoglobulins is discussed, for example, by D. Wilkinson (The Scientist, published by The Scientist, Inc., Philadelphia Pa., Vol. 14, No. 8 (Apr. 17, 2000), pp. 25-28).

[0328] 4.13.2 Monoclonal Antibodies

[0329] The term “monoclonal antibody” (MAb) or “monoclonal antibody composition”, as used herein, refers to a population of antibody molecules that contain only one molecular species of antibody molecule consisting of a unique light chain gene product and a unique heavy chain gene product. In particular, the complementarity determining regions (CDRs) of the monoclonal antibody are identical in all the molecules of the population. MAbs thus contain an antigen binding site capable of immunoreacting with a particular epitope of the antigen characterized by a unique binding affinity for it.

[0330] Monoclonal antibodies can be prepared using hybridoma methods, such as those described by Kohler and Milstein, Nature, 256:495 (1975). In a hybridoma method, a mouse, hamster, or other appropriate host animal, is typically immunized with an immunizing agent to elicit lymphocytes that produce or are capable of producing antibodies that will specifically bind to the immunizing agent. Alternatively, the lymphocytes can be immunized in vitro. The immunizing agent will typically include the protein antigen, a fragment thereof or a fusion protein thereof. Generally, either peripheral blood lymphocytes are used if cells of human origin are desired, or spleen cells or lymph node cells are used if non-human mammalian sources are desired. The lymphocytes are then fused with an immortalized cell line using a suitable fusing agent, such as polyethylene glycol, to form a hybridoma cell (Goding, Monoclonal Antibodies: Principles and Practice, Academic Press, (1986) pp. 59-103). Immortalized cell lines are usually transformed mammalian cells, particularly myeloma cells of rodent, bovine and human origin. Usually, rat or mouse myeloma cell lines are employed. The hybridoma cells can be cultured in a suitable culture medium that preferably contains one or more substances that inhibit the growth or survival of the unfused, immortalized cells. For example, if the parental cells lack the enzyme hypoxanthine guanine phosphoribosyl transferase (HGPRT or HPRT), the culture medium for the hybridomas typically will include hypoxanthine, aminopterin, and thymidine (“HAT medium”), which substances prevent the growth of HGPRT-deficient cells.

[0331] Preferred immortalized cell lines are those that fuse efficiently, support stable high level expression of antibody by the selected antibody-producing cells, and are sensitive to a medium such as HAT medium. More preferred immortalized cell lines are murine myeloma lines, which can be obtained, for instance, from the Salk Institute Cell Distribution Center, San Diego, Calif. and the American Type Culture Collection, Manassas, Va. Human myeloma and mouse-human heteromyeloma cell lines also have been described for the production of human monoclonal antibodies (Kozbor, J. Immunol., 133:3001 (1984); Brodeur et al., Monoclonal Antibody Production Techniques and Applications, Marcel Dekker, Inc., New York, (1987) pp. 51-63).

[0332] The culture medium in which the hybridoma cells are cultured can then be assayed for the presence of monoclonal antibodies directed against the antigen. Preferably, the binding specificity of monoclonal antibodies produced by the hybridoma cells is determined by immunoprecipitation or by an in vitro binding assay, such as radioimmunoassay (RIA) or enzyme-linked immunoabsorbent assay (ELISA). Such techniques and assays are known in the art. The binding affinity of the monoclonal antibody can, for example, be determined by the Scatchard analysis of Munson and Pollard, Anal. Biochem., 107:220 (1980). Preferably, antibodies having a high degree of specificity and a high binding affinity for the target antigen are isolated.

[0333] After the desired hybridoma cells are identified, the clones can be subcloned by limiting dilution procedures and grown by standard methods. Suitable culture media for this purpose include, for example, Dulbecco's Modified Eagle's Medium and RPMI-1640 medium. Alternatively, the hybridoma cells can be grown in vivo as ascites in a mammal. The monoclonal antibodies secreted by the subclones can be isolated or purified from the culture medium or ascites fluid by conventional immunoglobulin purification procedures such as, for example, protein A-Sepharose, hydroxylapatite chromatography, gel electrophoresis, dialysis, or affinity chromatography.

[0334] The monoclonal antibodies can also be made by recombinant DNA methods, such as those described in U.S. Pat. No. 4,816,567. DNA encoding the monoclonal antibodies of the invention can be readily isolated and sequenced using conventional procedures (e.g., by using oligonucleotide probes that are capable of binding specifically to genes encoding the heavy and light chains of murine antibodies). The hybridoma cells of the invention serve as a preferred source of such DNA. Once isolated, the DNA can be placed into expression vectors, which are then transfected into host cells such as simian COS cells, Chinese hamster ovary (CHO) cells, or myeloma cells that do not otherwise produce immunoglobulin protein, to obtain the synthesis of monoclonal antibodies in the recombinant host cells. The DNA also can be modified, for example, by substituting the coding sequence for human heavy and light chain constant domains in place of the homologous murine sequences (U.S. Pat. No. 4,816,567; Morrison, Nature 368, 812-13 (1994)) or by covalently joining to the immunoglobulin coding sequence all or part of the coding sequence for a non-immunoglobulin polypeptide. Such a non-immunoglobulin polypeptide can be substituted for the constant domains of an antibody of the invention, or can be substituted for the variable domains of one antigen-combining site of an antibody of the invention to create a chimeric bivalent antibody.

[0335] 4.133 Humanized Antibodies

[0336] The antibodies directed against the protein antigens of the invention can further comprise 4 humanized antibodies or human antibodies. These antibodies are suitable for administration to humans without engendering an immune response by the human against the administered immunoglobulin. Humanized forms of antibodies are chimeric immunoglobulins, immunoglobulin chains or fragments thereof (such as Fv, Fab, Fab′, F(ab′)₂ or other antigen-binding subsequences of antibodies) that are principally comprised of the sequence of a human immunoglobulin, and contain minimal sequence derived from a non-human immunoglobulin. Humanization can be performed following the method of Winter and co-workers (Jones et al., Nature, 321:522-525 (1986); Riechmann et al., Nature, 332:323-327 (1988); Verhoeyen et al., Science, 239:1534-1536 (1988)), by substituting rodent CDRs or CDR sequences for the corresponding sequences of a human antibody. (See also U.S. Pat. No. 5,225,539.) In some instances, Fv framework residues of the human immunoglobulin are replaced by corresponding non-human residues. Humanized antibodies can also comprise residues which are found neither in the recipient antibody nor in the imported CDR or framework sequences. In general, the humanized antibody will comprise substantially all of at least one, and typically two, variable domains, in which all or substantially all of the CDR regions correspond to those of a non-human immunoglobulin and all or substantially all of the framework regions are those of a human immunoglobulin consensus sequence. The humanized antibody optimally also will comprise at least a portion of an immunoglobulin constant region (Fc), typically that of a human immunoglobulin (Jones et al., 1986; Riechmann et al., 1988; and Presta, Curr. Op. Struct. Biol., 2:593-596 (1992)).

[0337] 4.13.4 Human Antibodies

[0338] Fully human antibodies relate to antibody molecules in which essentially the entire sequences of both the light chain and the heavy chain, including the CDRs, arise from human genes. Such antibodies are termed “human antibodies”, or “fully human antibodies” herein. Human monoclonal antibodies can be prepared by the trioma technique; the human B-cell hybridoma technique (see Kozbor, et al., 1983 Immunol Today 4: 72) and the EBV hybridoma technique to produce human monoclonal antibodies (see Cole, et al., 1985 In: MONOCLONAL ANTIBODIES AND CANCER THERAPY, Alan R. Liss, Inc., pp. 77-96). Human monoclonal antibodies may be utilized in the practice of the present invention and may be produced by using human hybridomas (see Cote, et al., 1983. Proc Natl Acad Sci USA 80: 2026-2030) or by transforming human B-cells with Epstein Barr Virus in vitro (see Cole, et al., 1985 In: MONOCLONAL ANTIBODIES AND CANCER THERAPY, Alan R. Liss, Inc., pp 77-96).

[0339] In addition, human antibodies can also be produced using additional techniques, including phage display libraries (Hoogenboom and Winter, J. Mol. Biol., 227:381 (1991); Marks et al., J. Mol. Biol., 222:581 (1991)). Similarly, human antibodies can be made by introducing human immunoglobulin loci into transgenic animals, e.g., mice in which the endogenous immunoglobulin genes have been partially or completely inactivated. Upon challenge, human antibody production is observed, which closely resembles that seen in humans in all respects, including gene rearrangement, assembly, and antibody repertoire. This approach is described, for example, in U.S. Pat. Nos. 5,545,807; 5,545,806; 5,569,825; 5,625,126; 5,633,425; 5,661,016, and in Marks et al. (Bio/Technology 10, 779-783 (1992)); Lonberg et al. (Nature 368 856-859 (1994)); Morrison (Nature 368, 812-13 (1994)); Fishwild et al,(Nature Biotechnology, 14, 845-51 (1996)); Neuberger (Nature Biotechnology 14, 826 (1996)); and Lonberg and Huszar (Intem. Rev. Immunol. 13 65-93 (1995)).

[0340] Human antibodies may additionally be produced using transgenic nonhuman animals which are modified so as to produce fully human antibodies rather than the animal's endogenous antibodies in response to challenge by an antigen. (See PCT publication WO94/02602). The endogenous genes encoding the heavy and light immunoglobulin chains in the nonhuman host have been incapacitated, and active loci encoding human heavy and light chain immunoglobulins are inserted into the host's genome. The human genes are incorporated, for example, using yeast artificial chromosomes containing the requisite human DNA segments. An animal which provides all the desired modifications is then obtained as progeny by crossbreeding intermediate transgenic animals containing fewer than the full complement of the modifications. The preferred embodiment of such a nonhuman animal is a mouse, and is termed the Xenomouse as disclosed in PCT publications WO 96/33735 and WO 96/34096. This animal produces B cells which secrete filly human immunoglobulins. The antibodies can be obtained directly from the animal after immunization with an immunogen of interest, as, for example, a preparation of a polyclonal antibody, or alternatively from immortalized B cells derived from the animal, such as hybridomas producing monoclonal antibodies. Additionally, the genes encoding the immunoglobulins with human variable regions can be recovered and expressed to obtain the antibodies directly, or can be further modified to obtain analogs of antibodies such as, for example, single chain Fv molecules.

[0341] An example of a method of producing a nonhuman host, exemplified as a mouse, lacking expression of an endogenous immunoglobulin heavy chain is disclosed in U.S. Pat. No. 5,939,598. It can be obtained by a method including deleting the J segment genes from at least one endogenous heavy chain locus in an embryonic stem cell to prevent rearrangement of the locus and to prevent formation of a transcript of a rearranged immunoglobulin heavy chain locus, the deletion being effected by a targeting vector containing a gene encoding a selectable marker; and producing from the embryonic stem cell a transgenic mouse whose somatic and germ cells contain the gene encoding the selectable marker.

[0342] A method for producing an antibody of interest, such as a human antibody, is disclosed in U.S. Pat. No. 5,916,771. It includes introducing an expression vector that contains a nucleotide sequence encoding a heavy chain into one mammalian host cell in culture, introducing an expression vector containing a nucleotide sequence encoding a light chain into another mammalian host cell, and fusing the two cells to form a hybrid cell. The hybrid cell expresses an antibody containing the heavy chain and the light chain.

[0343] In a further improvement on this procedure, a method for identifying a clinically relevant epitope on an immunogen, and a correlative method for selecting an antibody that binds immunospecifically to the relevant epitope with high affinity, are disclosed in PCT publication WO 99/53049.

[0344] 4.13.5 F_{ab} Fragments and Single Chain Antibodies

[0345] According to the invention, techniques can be adapted for the production of single-chain antibodies specific to an antigenic protein of the invention (see e.g., U.S. Pat. No. 4,946,778). In addition, methods can be adapted for the construction of Fab expression libraries (see e.g., Huse, et al., 1989 Science 246: 1275-1281) to allow rapid and effective identification of monoclonal F_{ab} fragments with the desired specificity for a protein or derivatives, fragments, analogs or homologs thereof. Antibody fragments that contain the idiotypes to a protein antigen may be produced by techniques known in the art including, but not limited to: (i) an F_{(ab)2} fragment produced by pepsin digestion of an antibody molecule; (ii) an F_{ab} fragment generated by reducing the disulfide bridges of an F_{(ab)2} fragment; (iii) an F_{ab} fragment generated by the treatment of the antibody molecule with papain and a reducing agent and (iv) Fᵥ fragments.

[0346] 4.13.6 Bispecific Antibodies

[0347] Bispecific antibodies are monoclonal, preferably human or humanized, antibodies that have binding specificities for at least two different antigens. In the present case, one of the binding specificities is for an antigenic protein of the invention. The second binding target is any other antigen, and advantageously is a cell-surface protein or receptor or receptor subunit.

[0348] Methods for making bispecific antibodies are known in the art. Traditionally, the recombinant production of bispecific antibodies is based on the co-expression of two immunoglobulin heavy-chain/light-chain pairs, where the two heavy chains have different specificities (Mistein and Cuello, Nature, 305:537-539 (1983)). Because of the random assortment of immunoglobulin heavy and light chains, these hybridomas (quadromas) produce a potential mixture of ten different antibody molecules, of which only one has the correct bispecific structure. The purification of the correct molecule is usually accomplished by affinity chromatography steps. Similar procedures are disclosed in WO 93/08829, published 13 May 1993, and in Traunecker et al., 1991 EMBO J., 10:3655-3659.

[0349] Antibody variable domains with the desired binding specificities (antibody-antigen combining sites) can be fused to immunoglobulin constant domain sequences. The fusion preferably is with an immunoglobulin heavy-chain constant domain, comprising at least part of the hinge, CH2, and CH3 regions. It is preferred to have the first heavy-chain constant region (CH1) containing the site necessary for light-chain binding present in at least one of the fusions. DNAs encoding the immunoglobulin heavy-chain fusions and, if desired, the immunoglobulin light chain, are inserted into separate expression vectors, and are co-transfected into a suitable host organism. For further details of generating bispecific antibodies see, for example, Suresh et al., Methods in Enzymology, 121:210 (1986).

[0350] According to another approach described in WO 96/27011, the interface between a pair of antibody molecules can be engineered to maximize the percentage of heterodimers which are recovered from recombinant cell culture. The preferred interface comprises at least a part of the CH3 region of an antibody constant domain. In this method, one or more small amino acid side chains from the interface of the first antibody molecule are replaced with larger side chains (e.g. tyrosine or tryptophan). Compensatory “cavities” of identical or similar size to the large side chain(s) are created on the interface of the second antibody molecule by replacing large amino acid side chains with smaller ones (e.g. alanine or threonine). This provides a mechanism for increasing the yield of the heterodimer over other unwanted end-products such as homodimers.

[0351] Bispecific antibodies can be prepared as full length antibodies or antibody fragments (e.g. F(ab′)₂ bispecific antibodies). Techniques for generating bispecific antibodies from antibody fragments have been described in the literature. For example, bispecific antibodies can be prepared using chemical linkage. Brennan et al., Science 229:81 (1985) describe a procedure wherein intact antibodies are proteolytically cleaved to generate F(ab′)₂ fragments. These fragments are reduced in the presence of the dithiol complexing agent sodium arsenite to stabilize vicinal dithiols and prevent intermolecular disulfide formation. The Fab′ fragments generated are then converted to thionitrobenzoate (TNB) derivatives. One of the Fab′-TNB derivatives is then reconverted to the Fab′-thiol by reduction with mercaptoethylamine and is mixed with an equimolar amount of the other Fab′-TNB derivative to form the bispecific antibody. The bispecific antibodies produced can be used as agents for the selective immobilization of enzymes.

[0352] Additionally, Fab′ fragments can be directly recovered from E. coli and chemically coupled to form bispecific antibodies. Shalaby et al., J. Exp. Med. 175:217-225 (1992) describe the production of a fully humanized bispecific antibody F(ab′)₂ molecule. Each Fab′ fragment was separately secreted from E. coli and subjected to directed chemical coupling in vitro to form the bispecific antibody. The bispecific antibody thus formed was able to bind to cells overexpressing the ErbB2 receptor and normal human T cells, as well as trigger the lytic activity of human cytotoxic lymphocytes against human breast tumor targets.

[0353] Various techniques for making and isolating bispecific antibody fragments directly from recombinant cell culture have also been described. For example, bispecific antibodies have been produced using leucine zippers. Kostelny et al., J. Immunol. 148(5):1547-1553 (1992). The leucine zipper peptides from the Fos and Jun proteins were linked to the Fab′ portions of two different antibodies by gene fusion. The antibody homodimers were reduced at the hinge region to form monomers and then re-oxidized to form the antibody heterodimers. This method can also be utilized for the production of antibody homodimers. The “diabody” technology described by Hollinger et al., Proc. Natl. Acad. Sci. USA 90:6444-6448 (1993) has provided an alternative mechanism for making bispecific antibody fragments. The fragments comprise a heavy-chain variable domain (VH) connected to a light-chain variable domain (VL) by a linker which is too short to allow pairing between the two domains on the same chain. Accordingly, the VH and VL domains of one fragment are forced to pair with the complementary VL and VH domains of another fragment, thereby forming two antigen-binding sites. Another strategy for making bispecific antibody fragments by the use of single-chain Fv (sFv) dimers has also been reported. See, Gruber et al., J. Immunol. 152:5368 (1994).

[0354] Antibodies with more than two valencies are contemplated. For example, trispecific antibodies can be prepared. Tutt et al., J. Immunol. 147:60 (1991). Exemplary bispecific antibodies can bind to two different epitopes, at least one of which originates in the protein antigen of the invention. Alternatively, an anti-antigenic arm of an immunoglobulin molecule can be combined with an arm which binds to a triggering molecule on a leukocyte such as a T-cell receptor molecule (e.g. CD2, CD3, CD28, or B7), or Fc receptors for IgG (FcyR), such as FcyRI (CD64), FcyRII (CD32) and FcyRIII (CD16) so as to focus cellular defense mechanisms to the cell expressing the particular antigen. Bispecific antibodies can also be used to direct cytotoxic agents to cells which express a particular antigen. These antibodies possess an antigen-binding arm and an arm which binds a cytotoxic agent or a radionuclide chelator, such as EOTUBE, DPTA, DOTA, or TETA. Another bispecific antibody of interest binds the protein antigen described herein and further binds tissue factor (TF).

[0355] 4.13.7 Heteroconjugate Antibodies

[0356] Heteroconjugate antibodies are also within the scope of the present invention. Heteroconjugate antibodies are composed of two covalently joined antibodies. Such antibodies have, for example, been proposed to target immune system cells to unwanted cells (U.S. Pat. No. 4,676,980), and for treatment of HIV infection (WO 91/00360; WO 92/200373; EP 03089). It is contemplated that the antibodies can be prepared in vitro using known methods in synthetic protein chemistry, including those involving crosslinking agents. For example, immunotoxins can be constructed using a disulfide exchange reaction or by forming a thioether bond. Examples of suitable reagents for this purpose include iminothiolate and methyl4-mercaptobutyrimidate and those disclosed, for example, in U.S. Pat. No. 4,676,980.

[0357] 4.13.8 Effector Function Engineering

[0358] It can be desirable to modify the antibody of the invention with respect to effector function, so as to enhance, e.g., the effectiveness of the antibody in treating cancer. For example, cysteine residue(s) can be introduced into the Fc region, thereby allowing interchain disulfide bond formation in this region. The homodimeric antibody thus generated can have improved internalization capability and/or increased complement-mediated cell killing and antibody-dependent cellular cytotoxicity (ADCC). See Caron et al., J. Exp Med., 176: 1191-1195 (1992) and Shopes, J. Immunol., 148: 2918-2922 (1992). Homodimeric antibodies with enhanced anti-tumor activity can also be prepared using heterobifunctional cross-linkers as described in Wolff et al. Cancer Research, 53: 2560-2565 (1993). Alternatively, an antibody can be engineered that has dual Fc regions and can thereby have enhanced complement lysis and ADCC capabilities. See Stevenson et al., Anti-Cancer Drug Design, 3: 219-230 (1989).

[0359] 4.13.9 Immunoconjugates

[0360] The invention also pertains to immunoconjugates comprising an antibody conjugated to a cytotoxic agent such as a chemotherapeutic agent, toxin (e.g., an enzymatically active toxin of bacterial, fungal, plant, or animal origin, or fragments thereof), or a radioactive isotope (i.e., a radioconjugate).

[0361] Chemotherapeutic agents useful in the generation of such immunoconjugates have been described above. Enzymatically active toxins and fragments thereof that can be used include diphtheria A chain, nonbinding active fragments of diphtheria toxin, exotoxin A chain (from Pseudomonas aeruginosa), ricin A chain, abrin A chain, modeccin A chain, alpha-sarcin, Aleurites fordii proteins, dianthin proteins, Phytolaca americana proteins (PAPI, PAPII, and PAP-S), momordica charantia inhibitor, curcin, crotin, sapaonaria officinalis inhibitor, gelonin, mitogellin, restrictocin, phenomycin, enomycin, and the tricothecenes. A variety of radionuclides are available for the production of radioconjugated antibodies. Examples include ²¹²Bi, ¹³¹I, ¹³¹In, ⁹⁰Y, and ¹⁸⁶Re.

[0362] Conjugates of the antibody and cytotoxic agent are made using a variety of bifunctional protein-coupling agents such as N-succininidyl-3-(2-pyridyldithiol) propionate (SPDP), iminothiolane (IT), bifunctional derivatives of imidoesters (such as dimethyl adipimidate HCL), active esters (such as disuccinimidyl suberate), aldehydes (such as glutareldehyde), bis-azido compounds (such as bis (p-azidobenzoyl) hexanediamine), bis-diazonium derivatives (such as bis-(p-diazoniumbenzoyl)-ethylenediamine), diusocyanates (such as tolyene 2,6-diisocyanate), and bis-active fluorine compounds (such as 1,5-difluoro-2,4-dinitrobenzene). For example, a ricin immunotoxin can be prepared as described in Vitetta et al., Science, 238: 1098 (1987). Carbon-14-labeled 1-isothiocyanatobenzyl-3-methyldiethylene triaminepentaacetic acid (MX-DTPA) is an exemplary chelating agent for conjugation of radionucleotide to the antibody. See WO94/11026.

[0363] In another embodiment, the antibody can be conjugated to a “receptor” (such streptavidin) for utilization in tumor pretargeting wherein the antibody-receptor conjugate is administered to the patient, followed by removal of unbound conjugate from the circulation using a clearing agent and then administration of a “ligand” (e.g., avidin) that is in turn conjugated to a cytotoxic agent.

[0364] 4.14 Computer Readable Sequences

[0365] In one application of this embodiment, a nucleotide sequence of the present invention can be recorded on computer readable media. As used herein, “computer readable media” refers to any medium which can be read and accessed directly by a computer. Such media include, but are not limited to: magnetic storage media, such as floppy discs, hard disc storage medium, and magnetic tapc; optical storage media such as CD-ROM; electrical storage media such as RAM and ROM; and hybrids of these categories such as magnetic/optical storage media. A skilled artisan can readily appreciate how any of the presently known computer readable mediums can be used to create a manufacture comprising computer readable medium having recorded thereon a nucleotide sequence of the present invention. As used herein, “recorded” refers to a process for storing information on computer readable medium. A skilled artisan can readily adopt any of the presently known methods for recording information on computer readable medium to generate manufactures comprising the nucleotide sequence information of the present invention.

[0366] A variety of data storage structures are available to a skilled artisan for creating a computer readable medium having recorded thereon a nucleotide sequence of the present invention. The choice of the data storage structure will generally be based on the means chosen to access the stored information. In addition, a variety of data processor programs and formats can be used to store the nucleotide sequence information of the present invention on computer readable medium. The sequence information can be represented in a word processing text file, formatted in commercially-available software such as WordPerfect and Microsoft Word, or represented in the form of an ASCII file, stored in a database application, such as DB2, Sybase, Oracle, or the like. A skilled artisan can readily adapt any number of data processor structuring formats (e.g. text file or database) in order to obtain computer readable medium having recorded thereon the nucleotide sequence information of the present invention.

[0367] By providing any of the nucleotide sequences SEQ ID NO: 1-172, or 345-516 or a representative fragment thereof; or a nucleotide sequence at least 95% identical to any of the nucleotide sequences of SEQ ID NO: 1-172, or 345-516 in computer readable form, a skilled artisan can routinely access the sequence information for a variety of purposes. Computer software is publicly available which allows a skilled artisan to access sequence information provided in a computer readable medium. The examples which follow demonstrate how software which implements the BLAST (Altschul et al., J. Mol. Biol. 215:403-410 (1990)) and BLAZE (Brutlag et al., Comp. Chem. 17:203-207 (1993)) search algorithms on a Sybase system is used to identify open reading frames (ORFs) within a nucleic acid sequence. Such ORFs may be protein encoding fragments and may be useful in producing commercially important proteins such as enzymes used in fermentation reactions and in the production of commercially useful metabolites.

[0368] As used herein, “a computer-based system” refers to the hardware means, software means, and data storage means used to analyze the nucleotide sequence information of the present invention. The minimum hardware means of the computer-based systems of the present invention comprises a central processing unit (CPU), input means, output means, and data storage means. A skilled artisan can readily appreciate that any one of the currently available computer-based systems are suitable for use in the present invention. As stated above, the computer-based systems of the present invention comprise a data storage means having stored therein a nucleotide sequence of the present invention and the necessary hardware means and software means for supporting and implementing a search means. As used herein, “data storage means” refers to memory which can store nucleotide sequence information of the present invention, or a memory access means which can access manufactures having recorded thereon the nucleotide sequence information of the present invention.

[0369] As used herein, “search means” refers to one or more programs which are implemented on the computer-based system to compare a target sequence or target structural motif with the sequence information stored within the data storage means. Search means are used to identify fragments or regions of a known sequence which match a particular target sequence or target motif. A variety of known algorithms are disclosed publicly and a variety of commercially available software for conducting search means are and can be used in the computer-based systems of the present invention. Examples of such software includes, but is not limited to, Smith-Waterman, MacPattern (EMBL), BLASTN and BLASTA (NPOLYPEPTIDEIA). A skilled artisan can readily recognize that any one of the available algorithms or implementing software packages for conducting homology searches can be adapted for use in the present computer-based systems. As used herein, a “target sequence” can be any nucleic acid or amino acid sequence of six or more nucleotides or two or more amino acids. A skilled artisan can readily recognize that the longer a target sequence is, the less likely a target sequence will be present as a random occurrence in the database. The most preferred sequence length of a target sequence is from about 10 to 300 amino acids, more preferably from about 30 to 100 nucleotide residues. However, it is well recognized that searches for commercially important fragments, such as sequence fragments involved in gene expression and protein processing, may be of shorter length.

[0370] As used herein, “a target structural motif,” or “target motif,” refers to any rationally selected sequence or combination of sequences in which the sequence(s) are chosen based on a three-dimensional configuration which is formed upon the folding of the target motif. There are a variety of target motifs known in the art. Protein target motifs include, but are not limited to, enzyme active sites and signal sequences. Nucleic acid target motifs include, but are not limited to, promoter sequences, hairpin structures and inducible expression elements (protein binding sequences).

[0371] 4.15 Triple Helix Formation

[0372] In addition, the fragments of the present invention, as broadly described, can be used to control gene expression through triple helix formation or antisense DNA or RNA, both of which methods are based on the binding of a polynucleotide sequence to DNA or RNA. Polynucleotides suitable for use in these methods are preferably 20 to 40 bases in length and are designed to be complementary to a region of the gene involved in transcription (triple helix—see Lee et al., Nucl. Acids Res. 6:3073 (1979); Cooney et al., Science 15241:456 (1988); and Dervan et al., Science 251:1360 (1991)) or to the mRNA itself (antisense—Olmno, J. Neurochem. 56:560 (1991); Oligodeoxynucleotides as Antisense Inhibitors of Gene Expression, CRC Press, Boca Raton, Fla. (1988)). Triple helix-formation optimally results in a shut-off of RNA transcription from DNA, while antisense RNA hybridization blocks translation of an MRNA molecule into polypeptide. Both techniques have been demonstrated to be effective in model systems. Information contained in the sequences of the present invention is necessary for the design of an antisense or triple helix oligonucleotide.

[0373] 4.16 Diagnostic Assays and Kits

[0374] The present invention further provides methods to identify the presence or expression of one of the ORFs of the present invention, or homolog thereof, in a test sample, using a nucleic acid probe or antibodies of the present invention, optionally conjugated or otherwise associated with a suitable label.

[0375] In general, methods for detecting a polynucleotide of the invention can comprise contacting a sample with a compound that binds to and forms a complex with the polynucleotide for a period sufficient to form the complex, and detecting the complex, so that if a complex is detected, a polynucleotide of the invention is detected in the sample. Such methods can also comprise contacting a sample under stringent hybridization conditions with nucleic acid primers that anneal to a polynucleotide of the invention under such conditions, and amplifying annealed polynucleotides, so that if a polynucleotide is amplified, a polynucleotide of the invention is detected in the sample.

[0376] In general, methods for detecting a polypeptide of the invention can comprise contacting a sample with a compound that binds to and forms a complex with the polypeptide for a period sufficient to form the complex, and detecting the complex, so that if a complex is detected, a polypeptide of the invention is detected in the sample.

[0377] In detail, such methods comprise incubating a test sample with one or more of the antibodies or one or more of the nucleic acid probes of the present invention and assaying for binding of the nucleic acid probes or antibodies to components within the test sample.

[0378] Conditions for incubating a nucleic acid probe or antibody with a test sample vary. Incubation conditions depend on the format employed in the assay, the detection methods employed, and the type and nature of the nucleic acid probe or antibody used in the assay. One skilled in the art will recognize that any one of the commonly available hybridization, amplification or immunological assay formats can readily be adapted to employ the nucleic acid probes or antibodies of the present invention. Examples of such assays can be found in Chard, T., An Introduction to Radioimmunoassay and Related Techniques, Elsevier Science Publishers, Amsterdam, The Netherlands (1986); Bullock, G. R. et al., Techniques in Immunocytochemistry, Academic Press, Orlando, Fla. Vol. 1 (1982), Vol. 2 (1983), Vol. 3 (1985); Tijssen, P., Practice and Theory of immunoassays: Laboratory Techniques in Biochemistry and Molecular Biology, Elsevier Science Publishers, Amsterdam, The Netherlands (1985). The test samples of the present invention include cells, protein or membrane extracts of cells, or biological fluids such as sputum, blood, serum, plasma, or urine. The test sample used in the above-described method will vary based on the assay format, nature of the detection method and the tissues, cells or extracts used as the sample to be assayed. Methods for preparing protein extracts or membrane extracts of cells are well known in the art and can be readily be adapted in order to obtain a sample which is compatible with the system utilized.

[0379] In another embodiment of the present invention, kits are provided which contain the necessary reagents to carry out the assays of the present invention. Specifically, the invention provides a compartment kit to receive, in close confinement, one or more containers which comprises: (a) a first container comprising one of the probes or antibodies of the present invention; and (b) one or more other containers comprising one or more of the following: wash reagents, reagents capable of detecting presence of a bound probe or antibody.

[0380] In detail, a compartment kit includes any kit in which reagents are contained in separate containers. Such containers include small glass containers, plastic containers or strips of plastic or paper. Such containers allows one to efficiently transfer reagents from one compartment to another compartment such that the samples and reagents are not cross-contaminated, and the agents or solutions of each container can be added in a quantitative fashion from one compartment to another. Such containers will include a container which will accept the test sample, a container which contains the antibodies used in the assay, containers which contain wash reagents (such as phosphate buffered saline, Tris-buffers, etc.), and containers which contain the reagents used to detect the bound antibody or probe. Types of detection reagents include labeled nucleic acid probes, labeled secondary antibodies, or in the alternative, if the primary antibody is labeled, the enzymatic, or antibody binding reagents which are capable of reacting with the labeled antibody. One skilled in the art will readily recognize that the disclosed probes and antibodies of the present invention can be readily incorporated into one of the established kit formats which are well known in the art.

[0381] 4.17 Medical Imaging

[0382] The novel polypeptides and binding partners of the invention are useful in medical imaging of sites expressing the molecules of the invention (e.g., where the polypeptide of the invention is involved in the immune response, for imaging sites of inflammation or infection). See, e.g., Kunkel et al., U.S. Pat. No. 5,413,778. Such methods involve chemical attachment of a labeling or imaging agent, administration of the labeled polypeptide to a subject in a pharmaceutically acceptable carrier, and imaging the labeled polypeptide in vivo at the target site.

[0383] 4.18 Screening Assays

[0384] Using the isolated proteins and polynucleotides of the invention, the present invention further provides methods of obtaining and identifying agents which bind to a polypeptide encoded by an ORF corresponding to any of the nucleotide sequences set forth in SEQ ID NO: 1-172, or 345-516, or bind to a specific domain of the polypeptide encoded by the nucleic acid. In detail, said method comprises the steps of:

[0385] (a) contacting an agent with an isolated protein encoded by an ORF of the present invention, or nucleic acid of the invention; and

[0386] (b) determining whether the agent binds to said protein or said nucleic acid.

[0387] In general, therefore, such methods for identifying compounds that bind to a polynucleotide of the invention can comprise contacting a compound with a polynucleotide of the invention for a time sufficient to form a polynucleotide/compound complex, and detecting the complex, so that if a polynucleotide/compound complex is detected, a compound that binds to a polynucleotide of the invention is identified.

[0388] Likewise, in general, therefore, such methods for identifying compounds that bind to a polypeptide of the invention can comprise contacting a compound with a polypeptide of the invention for a time sufficient to form a polypeptide/compound complex, and detecting the complex, so that if a polypeptide/compound complex is detected, a compound that binds to a polynucleotide of the invention is identified.

[0389] Methods for identifying compounds that bind to a polypeptide of the invention can also comprise contacting a compound with a polypeptide of the invention in a cell for a time sufficient to form a polypeptide/compound complex, wherein the complex drives expression of a receptor gene sequence in the cell, and detecting the complex by detecting reporter gene sequence expression, so that if a polypeptide/compound complex is detected, a compound that binds a polypeptide of the invention is identified.

[0390] Compounds identified via such methods can include compounds which modulate the activity of a polypeptide of the invention (that is, increase or decrease its activity, relative to activity observed in the absence of the compound). Alternatively, compounds identified via such methods can include compounds which modulate the expression of a polynucleotide of the invention (that is, increase or decrease expression relative to expression levels observed in the absence of the compound). Compounds, such as compounds identified via the methods of the invention, can be tested using standard assays well known to those of skill in the art for their ability to modulate activity/expression.

[0391] The agents screened in the above assay can be, but are not limited to, peptides, carbohydrates, vitamin derivatives, or other pharmaceutical agents. The agents can be selected and screened at random or rationally selected or designed using protein modeling techniques.

[0392] For random screening, agents such as peptides, carbohydrates, pharmaceutical agents and the like are selected at random and are assayed for their ability to bind to the protein encoded by the ORF of the present invention. Alternatively, agents may be rationally selected or designed. As used herein, an agent is said to be “rationally selected or designed” when the agent is chosen based on the configuration of the particular protein. For example, one skilled in the art can readily adapt currently available procedures to generate peptides, pharmaceutical agents and the like, capable of binding to a specific peptide sequence, in order to generate rationally designed antipeptide peptides, for example see Hurby et al., Application of Synthetic Peptides: Antisense Peptides,” In Synthetic Peptides, A User's Guide, W. H. Freeman, NY (1992), pp. 289-307, and Kaspczak et al., Biochemistry 28:9230-8 (1989), or pharmaceutical agents, or the like.

[0393] In addition to the foregoing, one class of agents of the present invention, as broadly described, can be used to control gene expression through binding to one of the ORFs or EMFs of the present invention. As described above, such agents can be randomly screened or rationally designed/selected. Targeting the ORF or EMF allows a skilled artisan to design sequence specific or element specific agents, modulating the expression of either a single ORF or multiple ORFs which rely on the same EMF for expression control. One class of DNA binding agents are agents which contain base residues which hybridize or form a triple helix formation by binding to DNA or RNA. Such agents can be based on the classic phosphodiester, ribonucleic acid backbone, or can be a variety of sulfhydryl or polymeric derivatives which have base attachment capacity.

[0394] Agents suitable for use in these methods preferably contain 20 to 40 bases and are designed to be complementary to a region of the gene involved in transcription (triple helix—see Lee et al., Nucl. Acids Res. 6:3073 (1979); Cooney et al., Science 241:456 (1988); and Dervan et al., Science 251:1360 (1991)) or to the MRNA itself (antisense—Okano, J. Neurochem. 56:560 (1991); Oligodeoxynucleotides as Antisense Inhibitors of Gene Expression, CRC Press, Boca Raton, Fla. (1988)). Triple helix-formation optimally results in a shut-off of RNA transcription from DNA, while antisense RNA hybridization blocks translation of an mRNA molecule into polypeptide. Both techniques have been demonstrated to be effective in model systems. Information contained in the sequences of the present invention is necessary for the design of an antisense or triple helix oligonucleotide and other DNA binding agents.

[0395] Agents which bind to a protein encoded by one of the ORFs of the present invention can be used as a diagnostic agent. Agents which bind to a protein encoded by one of the ORFs of the present invention can be formulated using known techniques to generate a pharmaceutical composition.

[0396] 4.19 Use of Nucleic Acids as Probes

[0397] Another aspect of the subject invention is to provide for polypeptide-specific nucleic acid hybridization probes capable of hybridizing with naturally occurring nucleotide sequences. The hybridization probes of the subject invention may be derived from any of the nucleotide sequences SEQ ID NO: 1-172, or 345-516. Because the corresponding gene is only expressed in a limited number of tissues, a hybridization probe derived from of any of the nucleotide sequences SEQ ID NO: 1-172, or 345-516 can be used as an indicator of the presence of RNA of cell type of such a tissue in a sample.

[0398] Any suitable hybridization technique can be employed, such as, for example, in situ hybridization. PCR as described in U.S. Pat. Nos. 4,683,195 and 4,965,188 provides additional uses for oligonucleotides based upon the nucleotide sequences. Such probes used in PCR may be of recombinant origin, may be chemically synthesized, or a mixture of both. The probe will comprise a discrete nucleotide sequence for the detection of identical sequences or a degenerate pool of possible sequences for identification of closely related genomic sequences.

[0399] Other means for producing specific hybridization probes for nucleic acids include the cloning of nucleic acid sequences into vectors for the production of MRNA probes. Such vectors are known in the art and are commercially available and may be used to synthesize RNA probes in vitro by means of the addition of the appropriate RNA polymerase as 17 or SP6 RNA polymerase and the appropriate radioactively labeled nucleotides. The nucleotide sequences may be used to construct hybridization probes for mapping their respective genomic sequences. The nucleotide sequence provided herein may be mapped to a chromosome or specific regions of a chromosome using well known genetic and/or chromosomal mapping techniques. These techniques include in situ hybridization, linkage analysis against known chromosomal markers, hybridization screening with libraries or flow-sorted chromosomal preparations specific to known chromosomes, and the like. The technique of fluorescent in situ hybridization of chromosome spreads has been described, among other places, in Verma et al (1988) Human Chromosomes: A Manual of Basic Techniques, Pergamon Press, New York N.Y.

[0400] Fluorescent in situ hybridization of chromosomal preparations and other physical chromosome mapping techniques may be correlated with additional genetic map data. Examples of genetic map data can be found in the 1994 Genome Issue of Science (265:1981f). Correlation between the location of a nucleic acid on a physical chromosomal map and a specific disease (or predisposition to a specific disease) may help delimit the region of DNA associated with that genetic disease. The nucleotide sequences of the subject invention may be used to detect differences in gene sequences between normal, carrier or affected individuals.

[0401] 4.20 Preparation of Support Bound Oligonucleotides

[0402] Oligonucleotides, i.e., small nucleic acid segments, may be readily prepared by, for example, directly synthesizing the oligonucleotide by chemical means, as is commonly practiced using an automated oligonucleotide synthesizer.

[0403] Support bound oligonucleotides may be prepared by any of the methods known to those of skill in the art using any suitable support such as glass, polystyrene or Teflon. One strategy is to precisely spot oligonucleotides synthesized by standard synthesizers. Immobilization can be achieved using passive adsorption (Inouye & Hondo, (1990) J. Clin. Microbiol. 28(6) 1469-72); using UV light (Nagata et al., 1985; Dahlenet al., 1987; Morrissey& Collins, (1989) Mol. Cell Probes 3(2) 189-207) or by covalent binding of base modified DNA (Keller et al., 1988; 1989); all references being specifically incorporated herein.

[0404] Another strategy that may be employed is the use of the strong biotin-streptavidin interaction as a linker. For example, Broude et al. (1994) Proc. Natl. Acad. Sci. USA 91(8) 3072-6, describe the use of biotinylated probes, although these are duplex probes, that are immobilized on streptavidin-coated magnetic beads. Streptavidin-coated beads may be purchased from Dynal, Oslo. Of course, this same linking chemistry is applicable to coating any surface with streptavidin. Biotinylated probes may be purchased from various sources, such as, e.g., Operon Technologies (Alameda, Calif.).

[0405] Nunc Laboratories (Naperville, Ill.) is also selling suitable material that could be used. Nunc Laboratories have developed a method by which DNA can be covalently bound to the microwell surface termed Covalink NH. CovaLinkNH is a polystyrene surface grafted with secondary amino groups (>NH) that serve as bridge-heads for further covalent coupling. CovaLink. Modules may be purchased from Nunc Laboratories. DNA molecules may be bound to CovaLink exclusively at the 5′-end by a phosphoramidate bond, allowing immobilization of more than 1 pmol of DNA (Rasmussenet al., (1991) Anal. Biochem. 198(1) 13842).

[0406] The use of CovaLink NH strips for covalent binding of DNA molecules at the 5′-end has been described (Rasmussen et al., (1991). In this technology, a phosphoramidate bond is employed (Chu et al., (1983) Nucleic Acids Res. 11 (8) 6513-29). This is beneficial as immobilization using only a single covalent bond is preferred. The phosphoramidate bond joins the DNA to the CovaLink NH secondary amino groups that are positioned at the end of spacer arms covalently grafted onto the polystyrene surface through a 2 nm long spacer arm. To link an oligonucleotide to CovaLink NH via an phosphoramidate bond, the oligonucleotide terminus must have a 5′-end phosphate group. It is, perhaps, even possible for biotin to be covalently bound to CovaLink and then streptavidin used to bind the probes.

[0407] More specifically, the linkage method includes dissolving DNA in water (7.5 ng/ul) and denaturing for 10 min. at 95° C. and cooling on ice for 10 min. Ice-cold 0.1 M 1-methylimidazole, pH 7.0 (1-MeIm₇), is then added to a final concentration of 10 mM 1-MeIm₇. A ss DNA solution is then dispensed into CovaLinkNH strips (75 ul/well) standing on ice.

[0408] Carbodiimide 0.2 M 1-ethyl-3-(3-dimethylaminopropyl)-carbodiimide (EDC), dissolved in 10 mM 1-MeIm₇, is made fresh and 25 ul added per well. The strips are incubated for 5 hours at 50° C. After incubation the strips are washed using, e.g., Nunc-Immuno Wash; first the wells are washed 3 times, then they are soaked with washing solution for 5 min., and finally they are washed 3 times (where in the washing solution is 0.4 N NaOH, 0.25% SDS heated to 50° C.).

[0409] It is contemplated that a further suitable method for use with the present invention is that described in PCT Patent Application WO 90/03382 (Southern & Maskos), incorporated herein by reference. This method of preparing an oligonucleotide bound to a support involves attaching a nucleoside 3′-reagent through the phosphate group by a covalent phosphodiester link to aliphatic hydroxyl groups carried by the support. The oligonucleotide is then synthesized on the supported nucleoside and protecting groups removed from the synthetic oligonucleotide chain under standard conditions that do not cleave the oligonucleotide from the support. Suitable reagents include nucleoside phosphoramidite and nucleoside hydrogen phosphorate.

[0410] An on-chip strategy for the preparation of DNA probe for the preparation of DNA probe arrays may be employed. For example, addressable laser-activated photodeprotection may be employed in the chemical synthesis of oligonucleotides directly on a glass surface, as described by Fodor et al. (1991) Science 251(4995) 767-73, incorporated herein by reference. Probes may also be immobilized on nylon supports as described by Van Ness et al. (1991) Nucleic Acids Res. 19(12) 3345-50; or linked to Teflon using the method of Duncan & Cavalier (1988) Anal. Biochem. 169(1) 104-8; all references being specifically incorporated herein.

[0411] To link an oligonucleotide to a nylon support, as described by VanNess et al. (1991), requires activation of the nylon surface via alkylation and selective activation of the 5′-amine of oligonucleotides with cyanuric chloride.

[0412] One particular way to prepare support bound oligonucleotides is to utilize the light-generated synthesis described by Pease et al., (1994)PNAS USA 91(11) 5022-6, incorporated herein by reference). These authors used current photolithographic techniques to generate arrays of immobilized oligonucleotide probes (DNA chips). These methods, in which light is used to direct the synthesis of oligonucleotide probes in high-density, miniaturized arrays, utilize photolabile 5′-protected N-acyl-deoxynucleoside phosphoramidites, surface linker chemistry and versatile combinatorial synthesis strategies. A matrix of 256 spatially defined oligonucleotide probes may be generated in this manner.

[0413] 4.21 Preparation of Nucleic Acid Fragments

[0414] The nucleic acids may be obtained from any appropriate source, such as cDNAs, genomic DNA, chromosomal DNA, microdissected chromosome bands, cosmid or YAC inserts, and RNA, including mRNA without any amplification steps. For example, Sambrook et al. (1989) describes three protocols for the isolation of high molecular weight DNA from mammalian cells (p. 9.14-9.23).

[0415] DNA fragments may be prepared as clones in M13, plasmid or lambda vectors and/or prepared directly from genomic DNA or CDNA by PCR or other amplification methods. Samples may be prepared or dispensed in multiwell plates. About 100-1000 ng of DNA samples may be prepared in 2-500 ml of final volume.

[0416] The nucleic acids would then be fragmented by any of the methods known to those of skill in the art including, for example, using restriction enzymes as described at 9.24-9.28 of Sambrook et al. (1989), shearing by ultrasound and NaOH treatment.

[0417] Low pressure shearing is also appropriate, as described by Schriefer et al. (1990) Nucleic Acids Res. 18(24) 7455-6, incorporated herein by reference). In this method, DNA samples are passed through a small French pressure cell at a variety of low to intermediate pressures. A lever device allows controlled application of low to intermediate pressures to the cell. The results of these studies indicate that low-pressure shearing is a useful alternative to sonic and enzymatic DNA fragmentation methods.

[0418] One particularly suitable way for fragmenting DNA is contemplated to be that using the two base recognition endonuclease, CviJI, described by Fitzgerald et al. (1992) Nucleic Acids Res. 20(14)3753-62. These authors described an approach for the rapid fragmentation and fractionation of DNA into particular sizes that they contemplated to be suitable for shotgun cloning and sequencing.

[0419] The restriction endonuclease CviJI normally cleaves the recognition sequence PuGCPy between the G and C to leave blunt ends. Atypical reaction conditions, which alter the specificity of this enzyme (CviJI**), yield a quasi-random distribution of DNA fragments form the small moleculepUC19 (2688 base pairs). Fitzgerald et al. (1992) quantitatively evaluated the randomness of this fragmentation strategy, using a CviJI* * digest of pUC19 that was size fractionated by a rapid gel filtration method and directly ligated, without end repair, to a lac Z minus M13 cloning vector. Sequence analysis of 76 clones showed that CviJI* * restricts pyGCPy and PuGCPu, in addition to PuGCPy sites, and that new sequence data is accumulated at a rate consistent with random fragmentation.

[0420] As reported in the literature, advantages of this approach compared to sonication and agarose gel fractionation include: smaller amounts of DNA are required (0.2-0.5 ug instead of 2-5 ug); and fewer steps are involved (no preligation, end repair, chemical extraction, or agarose gel electrophoresis and elution are needed Irrespective of the manner in which the nucleic acid fragments are obtained or prepared, it is important to denature the DNA to give single stranded pieces available for hybridization. This is achieved by incubating the DNA solution for 2-5 minutes at 80-90° C. The solution is then cooled quickly to 2° C. to prevent renaturation of the DNA fragments before they are contacted with the chip. Phosphate groups must also be removed from genomic DNA by methods known in the art.

[0421] 4.22 Preparation of DNA Arrays

[0422] Arrays may be prepared by spotting DNA samples on a support such as a nylon membrane. Spotting may be performed by using arrays of metal pins (the positions of which correspond to an array of wells in a microtiter plate) to repeated by transfer of about 20 nl of a DNA solution to a nylon membrane. By offset printing, a density of dots higher than the density of the wells is achieved. One to 25 dots may be accommodated in 1 mm², depending on the type of label used. By avoiding spotting in some preselected number of rows and columns, separate subsets (subarrays) may be formed. Samples in one subarray may be the same genomic segment of DNA (or the same gene) from different individuals, or may be different, overlapped genomic clones. Each of the subarrays may represent replica spotting of the same samples. In one example, a selected gene segment may be amplified from 64 patients. For each patient, the amplified gene segment may be in one 96-well plate (all 96 wells containing the same sample). A plate for each of the 64 patients is prepared. By using a 96-pin device, all samples may be spotted on one 8×12 cm membrane. subarrays may contain 64 samples, one from each patient. Where the 96 subarrays are identical, the dot span may be 1 mm² and there may be a 1 mm space between subarrays.

[0423] Another approach is to use membranes or plates (available from NUNC, Naperville, Ill.) which may be partitioned by physical spacers e.g. a plastic grid molded over the membrane, the grid being similar to the sort of membrane applied to the bottom of multiwell plates, or hydrophobic strips. A fixed physical spacer is not preferred for imaging by exposure to flat phosphor-storage screens or x-ray films.

[0424] The present invention is illustrated in the following examples. Upon consideration of the present disclosure, one of skill in the art will appreciate that many other embodiments and variations may be made in the scope of the present invention. Accordingly, it is intended that the broader aspects of the present invention not be limited to the disclosure of the following examples. The present invention is not to be limited in scope by the exemplified embodiments which are intended as illustrations of single aspects of the invention, and compositions and methods which are functionally equivalent are within the scope of the invention. Indeed, numerous modifications and variations in the practice of the invention are expected to occur to those skilled in the art upon consideration of the present preferred embodiments. Consequently, the only limitations which should be placed upon the scope of the invention are those which appear in the appended claims.

[0425] All references cited within the body of the instant specification are hereby incorporated by reference in their entirety.

### 5. EXAMPLES

### 5.1 Example 1

[0426] Novel Nucleic Acid Sequences Obtained from Various Libraries

[0427] A plurality of novel nucleic acids were obtained from cDNA libraries prepared from various human tissues and in some cases isolated from a genomic library derived from human chromosome using standard PCR, SBH sequence signature analysis and Sanger sequencing techniques. The inserts of the library were amplified with PCR using primers specific for the vector sequences which flank the inserts. Clones from cDNA libraries were spotted on nylon membrane filters and screened with oligonucleotide probes (e.g., 7-mers)to obtain signature sequences. The clones were clustered into groups of similar or identical sequences. Representative clones were selected for sequencing.

[0428] In some cases, the 5′ sequence of the amplified inserts was then deduced using a typical Sanger sequencing protocol. PCR products were purified and subjected to fluorescent dye terminator cycle sequencing. Single pass gel sequencing was done using a 377 Applied Biosystems (ABI) sequencer to obtain the novel nucleic acid sequences. In some cases RACE (Random Amplification of cDNA Ends) was performed to further extend the sequence in the 5′ direction.

### 5.2 Example 2

[0429] Assemblage of Novel Nucleic Acids

[0430] The contigs or nucleic acids of the present invention, designated as SEQ ID NO: 345-516 were assembled using an EST sequence as a seed. Then a recursive algorithm was used to extend the seed EST into an extended assemblage, by pulling additional sequences from different databases (i.e., Hyseq's database containing EST sequences, dbEST version 114, gb pri 114, and UniGene version 101 ) that belong to this assemblage The algorithm terminated when there was no additional sequences from the above databases that would extend the assemblage. Inclusion of component sequences into the assemblage was based on a BLASTN hit to the extending assemblage with BLAST score greater than 300 and percent identity greater than 95%.

[0431] Table 6 sets forth the novel predicted polypeptides (including proteins) encoded by the novel polynucleotides (SEQ ID NO: 517-688) of the present invention, and their corresponding nucleotide locations to each of SEQ ID NO: 517-688. Table 6 also indicates the method by which the polypeptide was predicted. Method A refers to a polypeptide obtained by using a software program called FASTY (available from http://fasta.bioch.viriniaedu) which selects a polypeptide based on a comparison of the translated novel polynucleotide to known polynucleotides (W. R. Pearson, Methods in Enzymology, 1 83:63-98 (1990), herein incorporated by reference). Method B refers to a polypeptide obtained by using a software program called GenScan for human/vertebrate sequences (available from Stanford University, Office of Technology Licensing) that predicts the polypeptide based on a probabilistic model of gene structure/compositional properties (C. Burge and S. Karlin, J. Mol. Biol., 268:78-94 (1997), incorporated herein by reference). Method C refers to a polypeptide obtained by using a Hyseq proprietary software program that translates the novel polynucleotide and its complementary strand into six possible amino acid sequences (forward and reverse frames) and chooses the polypeptide with the longest open reading frame.

### 5.3 Example 3

[0432] Novel Nucleic Acids

[0433] Using PHRAP (Univ. of Washington) or CAP4 (Paracel), full-length gene cDNA sequences and their corresponding protein sequences were generated from the assemblage. Any frame shifts and incorrect stop codons were corrected by hand editing. During editing, the sequence was checked using FASTY and/or BLAST against Genebank. Other computer programs which may have been used in the editing process were phredPhrap and Consed ((University of Washington) and ed-ready, ed-ext and gc-zip2 (Hyseq, Inc.)). The full-length nucleotide sequences are shown in the Sequence Listing as SEQ ID NO: 1-23. The amino acids are SEQ ID NO: 173-195.

[0434] Table 1 shows the various tissue sources of SEQ ID NO: 1-23.

[0435] The nearest neighbor results for SEQ ID NO: 1-23 were obtained by a BLASTP (version 2.0al 19MP-WashU) search against Genpept release 121 and Geneseq release 200101 (Derwent), using BLAST algorithm. The nearest neighbor result showed the closest homologue for SEQ ID NO: 1-23 from Genpept. The translated amino acid sequences for which the nucleic acid sequence encodes are shown in the Sequence Listing. The homologs with identifiable functions for SEQ ID NO: 1-23 are shown in Table 2 below.

[0436] Using eMatrix software package (Stanford University, Stanford, Calif.) (Wu et al., J. Comp. Biol., Vol. 6 pp. 219-235 (1999) herein incorporated by reference), all the sequences were examined to determine whether they had identifiable signature regions. Table 3 shows the signature region found in the indicated polypeptide sequences, the description of the signature, the eMatrix p-value(s) and the position(s) of the signature within the polypeptide sequence.

[0437] Using the pFam software program (Sonnhanuner et al., Nucleic Acids Res., Vol. 26(1) pp. 320-322 (1998) herein incorporated by reference) all the polypeptide sequences were examined for domains with homology to certain peptide domains. Table 4 shows the name of the domain found, the description, the p-value and the pFam score for the identified domain within the sequence.

[0438] The nucleotide sequence within the sequences that codes for signal peptide sequences and their cleavage sites can be determine from using Neural Network SignalP V1.1 program (from Center for Biological Sequence Analysis, The Technical University of Denmark). The process for identifing prokaryotic and eukaryotic signal peptides and their cleavage sites are also disclosed by Henrik Nielson, Jacob Engelbrecht, Soren Brunak, and Gunnar von Heijne in the publication “Identification of prokaryotic and eukaryotic signal peptides and prediction of their cleavage sites” Protein Engineering, Vol. 10, no. 1, pp. 1-6 (1997), incorporated herein by reference. A maximum S score and a mcan S score, as described in the Nielson et as reference, was obtained for the polypeptide sequences. Table 7 shows the position of the signal peptide in each of the polypeptides and the maximum score and mean score associated with that signal peptide.

### 5.4 Example 4

[0439] Novel Nucleic Acids

[0440] Using PHRAP (Univ. of Washington) or CAP4 (Paracel), a full length gene cDNA sequence and its corresponding protein sequence were generated from the assemblage. Any frame shifts and incorrect stop codons were corrected by hand editing. During editing, the sequence was checked using FASTY and/or BLAST against Genbank (i.e. dbEST version 1 17, gb pri 117, UniGene version 117, Genpept release 117). Other computer programs which may have been used in the editing process were phredPhrap and Consed (University of Washington) and ed-ready, ed-ext and gc-zip-2 (Hyseq, Inc.). The full-length nucleotide, including splice variants resulting from these procedures are shown in the Sequence Listing as SEQ ID NOS: 24-137. The corresponding amino acids are SEQ ID NO: 196-309.

[0441] Table 1 shows the various tissue sources of SEQ ID NO: 24-137.

[0442] The nearest neighbor results for SEQ ID NO: 24-137 were obtained by a BLASTP version 2.0al 19MP-WashU search against Genpept release 121 and Geneseq release 200101 (Derwent), using BLAST algorithm. The nearest neighbor result showed the closest homologue for SEQ ID NO: 24-137 from Genpept. The translated amino acid sequences for which the nucleic acid sequence encodes are shown in the Sequence Listing. The homologs with identifiable functions for SEQ ID NO: 24-137 are shown in Table 2 below.

[0443] Using eMatrix software package (Stanford University, Stanford, Calif.) (Wu et al., J. Comp. Biol., Vol. 6 pp. 219-235 (1999) herein incorporated by reference), all the sequences were examined to determine whether they had identifiable signature regions. Table 3 shows the signature region found in the indicated polypeptide sequences, the description of the signature, the eMatrix p-value(s) and the position(s) of the signature within the polypeptide sequence.

[0444] Using the pFam software program (Sonnhammer et al., Nucleic Acids Res., Vol. 26(1) pp. 320-322 (1998) herein incorporated by reference) all the polypeptide sequences were examined for domains with homology to certain peptide domains. Table 4 shows the name of the domain found, the description, the p-value and the pFam score for the identified domain within the sequence.

[0445] The nucleotide sequence within the sequences that codes for signal peptide sequences and their cleavage sites can be determine from using Neural Network SignalP V1.1 program (from Center for Biological Sequence Analysis, The Technical University of Denmark). The process for identifying prokaryotic and eukaryotic signal peptides and their cleavage sites are also disclosed by Henrik Nielson, Jacob Engelbrecht, Soren Brunak, and Gunnar von Heijne in the publication “Identification of prokaryotic and eukaryotic signal peptides and prediction of their cleavage sites” Protein Engineering, Vol. 10, no. 1, pp. 1-6 (1997), incorporated herein by reference. A maximum S score and a mean S score, as described in the Nielson et as reference, was obtained for the polypeptide sequences. Table 7 shows the position of the signal peptide in each of the polypeptides and the maximum score and mean score associated with that signal peptide.

### 5.5 Example 5)

[0446] Novel Nucleic Acids

[0447] Using PHRAP (Univ. of Washington) or CAP4 (Paracel), a full-length gene cDNA sequence and its corresponding protein sequence were generated from the assemblage. Any frame shifts and incorrect stop codons were corrected by hand editing. During editing, the sequence was checked using FASTY and/or BLAST against Genbank (i.e., dbEST version 118, gb pri 118, UniGene version 118, Genpept release 118). Other computer programs which may have been used in the editing process were phredPhrap and Consed (University of Washington) and ed-ready, ed-ext and gc-zip-2 (Hyseq, Inc.). The full-length nucleotide, including splice variants resulting from these procedures are shown in the Sequence Listing as SEQ ID NOS: 138-172. The corresponding amino acid sequences are SEQ ID NO: 310-344.

[0448] Table 1 shows the various tissue sources of SEQ ID NO: 138-172.

[0449] The homology results for SEQ ID NO: 138-172 were obtained by a BLASTP version 2.0al 19MP-WashU search against Genpept release 121 and Geneseq release 200101 (Derwent), using BLAST algorithm. The nearest neighbor result showed the homologs for SEQ ID NO: 138-172 from Genpept. The translated amino acid sequences for which the nucleic acid sequence encodes are shown in the Sequence Listing. The homologues with identifiable functions for SEQ ID NO: 138-172 are shown in Table 2 below.

[0450] Using eMatrix software package (Stanford University, Stanford, Calif.) (Wu et al., J. Comp. Biol., Vol. 6 pp. 219-235 (1999) herein incorporated by reference), all the sequences were examined to determine whether they had identifiable signature regions. Table 3 shows the signature region found in the indicated polypeptide sequences, the description of the signature, the eMatrix p-value(s) and the position(s) of the signature within the polypeptide sequence.

[0451] Using the pFam software program (Sonnhammer et al., Nucleic Acids Res., Vol. 26(1) pp. 320-322 (1998) herein incorporated by reference) all the polypeptide sequences were examined for domains with homology to certain peptide domains. Table 4 shows the name of the domain found, the description, the p-value and the pFam score for the identified domain within the sequence.

[0452] The nucleotide sequence within the sequences that codes for signal peptide sequences and their cleavage sites can be determine from using Neural Network SignalP V1.1 program (from Center for Biological Sequence Analysis, The Technical University of Denmark). The process for identifying prokaryotic and eukaryotic signal peptides and their cleavage sites are also disclosed by Henrik Nielson, Jacob Engelbrecht, Soren Brunak, and Gunnar von Heijne in the publication “Identification of prokaryotic and eukaryotic signal peptides and prediction of their cleavage sites” Protein Engineering, Vol. 10, no. 1, pp. 1-6 (1997), incorporated herein by reference. A maximum S score and a mean S score, as described in the Nielson et as reference, was obtained for the polypeptide sequences. Table 7 shows the position of the signal peptide in each of the polypeptides and the maximum score and mean score associated with that signal peptide.

[0453] Table 5 is a correlation table of all of the sequences and SEQ ID Nos.

TABLE 1

| Tissue Origin | RNA Source | Library Name | SEQ ID NOS: |
|---|---|---|---|
| fibroblast | Strategene | LFB001 | 37 62-63 69 87-89 108 124 126-127 |
| | | | 144-145 166 168 |
| NULL | NULL | CGSd001 | 25 54 74 |
| NULL | NULL | CGSd004 | 26 80 |
| NULL | NULL | CGSd005 | 11 91 166 |
| NULL | NULL | CGSd006 | 11 25-26 34 39 60 139 143 160 164 |
| | | | 166 |
| NULL | NULL | CGSd009 | 13 45 |
| NULL | NULL | CGd007 | 34 |
| NULL | NULL | CGd008 | 34 39 76 |
| NULL | NULL | CTL016 | 170 |
| NULL | NULL | CTL021 | 57 76 78 |
| NULL | NULL | PCR2V1 | 1 57 95 |
| NULL | NULL | PGEMV1 | 10 26 32 34 42 44 52 57 62 70 78 |
| | | | 95 113-114 122-124 144-145 150 |
| NULL | NULL | SUP002 | 32 35 57 62 78 149 153-154 168 |
| NULL | NULL | TEST | 52 |
| adipocytes | Stratagene | ADP001 | 6 8 38 91 95 97 104 108 110 144-145 |
| | | | 153-154 167 |
| adrenal | Clontech | ADR002 | 6 9 14 16 22 27 38-39 41 45 52 54 |
| gland | | | 62-63 74 79 81 90 107 111 123 126 |
| | | | 128 136 166 168 |
| adult | BioChain | ABR012 | 38 126 |
| brain | | | |
| adult | BioChain | ABR013 | 35 53 |
| brain | | | |
| adult | Clontech | ABR001 | 15 17 22 35 72 84 126 |
| brain | | | |
| adult | Clontech | ABR006 | 11 22-23 31-32 39 43 52 54-55 60 |
| brain | | | 81 84 102 110 139 149 168 |
| adult | Clontech | ABR008 | 1-4 7-12 18 22-24 27-28 31-33 35 |
| brain | | | 40 44-45 50 52-53 55 57-60 62 72 |
| | | | 74 81 84 87-89 93-96 98-99 102 |
| | | | 104 107-108 110-111 113-114 120-123 |
| | | | 130-131 136 142-145 147-148 |
| | | | 150 157 160 164 167-168 171-172 |
| adult | Clontech | ABR011 | 23 38 |
| brain | | | |
| adult | GIBCO | AB3001 | 6 17 19 22 38 52 54-55 62 74 86 |
| brain | | | 104 122 127-128 131 164 |
| adult | GIBCO | ABD003 | 6 10 18 22-23 32 35 38 40 52-53 |
| brain | | | 55 58 62 71-72 74 79-81 94-95 99 |
| | | | 105 108 111 113-114 122 126 128 |
| | | | 130-131 139 142 160-161 167-169 |
| adult | Invitrogen | ABR014 | 57 62 76 78 96 120-121 161 |
| brain | | | |
| adult | Invitrogen | ABR015 | 6 37 76 91 99 |
| brain | | | |
| adult | Invitrogen | ABR016 | 57 63 |
| brain | | | |
| adult | Invitrogen | ABT004 | 10 23 32 40 43 55 58 60 74 84 99 |
| brain | | | 112 120-121 148 167-168 |
| adult | GIBCO | AHR001 | 2 6 14 18-19 22 30 38-39 45 51-54 |
| heart | | | 57 60 62-63 66-67 74 76 79 81 87-91 |
| | | | 93-95 98 104 108 110 113-114 |
| | | | 122-124 126-128 135-136 140-141 |
| | | | 144-145 150 153-154 160 163 168-169 |
| | | | 171-172 |
| adult | GIBCO | AKD001 | 2 6-10 14 17-19 22 25 28-29 33-35 |
| kidney | | | 38-39 42-45 52 54-55 58 60-63 67 |
| | | | 72 74 79-80 86-89 91-96 99-101 |
| | | | 104-105 107-108 111-114 116 122-124 |
| | | | 126-128 130-132 136 138-139 |
| | | | 141 144-145 147 155 160 167-168 |
| | | | 172 |
| adult | Invitrogen | AKT002 | 1-2 6 20 34 38 41 43 52 62 76 81 |
| kidney | | | 87-90 94-95 105 138 152-154 160 |
| adult | Clontech | ALV003 | 38 57 76 95 149 |
| liver | | | |
| adult | Invitrogen | ALV002 | 9 14 22 26 41-42 45 55 62 65 87-89 |
| liver | | | 97 111 120-121 141 149 160 162 |
| | | | 164 168 |
| adult lung | GIBCO | ALG001 | 38 41 54-55 57 62 76 79 81 86 91 |
| | | | 104 111-112 120-121 123 160 163 |
| adult lung | Invitrogen | LGT002 | 1-3 5 8 10 14 17 19 21-23 25 27 |
| | | | 29 34 37-38 40-41 44-45 52-54 60-62 |
| | | | 68-70 81 84 86-91 93-96 99-101 |
| | | | 104 106-108 112-114 122-123 127 |
| | | | 131-132 135-136 141 144-145 148 |
| | | | 152-157 160-162 165 167-168 171-172 |
| adult | Clontech | SPLc01 | 9 16 52 55 62 81 143 150 153-154 |
| spleen | | | |
| adult | GIBCO | ASP001 | 1-2 6 10 18 34 38 40 42 51 57 61 |
| spleen | | | 72 74-76 78 80-81 86 90-91 95 104 |
| | | | 108 110-111 122-123 126 130-131 |
| | | | 143 153-154 168 172 |
| bladder | Invitrogen | BLD001 | 1 15 18 34 51 87-89 95 97 132 164 |
| bone | Clonetech | BMD007 | 57 76 138 |
| marrow | | | |
| bone | Clontech | BMD001 | 1-3 6 8-11 13-14 19 21 31 36 38-41 |
| marrow | | | 50 53-54 57 60-62 69 74 76 78 |
| | | | 81 85 90-91 93-96 105 107-109 |
| | | | 112-114 122 125-128 139 141 143 |
| | | | 148 153-154 159 161-162 166 169-172 |
| bone | Clontech | BMD004 | 38 57 76 91 98 |
| marrow | | | |
| bone | GF | BMD002 | 9 12 16 19 23 25 27 39 41-44 52-59 |
| marrow | | | 62 73-74 76 78 81 84 91 94-99 |
| | | | 109-110 113-114 120-121 125-128 |
| | | | 131 135 137 139 141-143 150 153-154 |
| | | | 162 168 172 |
| cervix | BioChain | CVX001 | 2 6-7 10 17 19-20 23-24 27 34 38 |
| | | | 52 54 60 62-63 69 80 87-91 93-96 |
| | | | 100-101 108 111 113-114 123 127-128 |
| | | | 134 136 141 144-145 152-154 |
| | | | 158 162 165 |
| colon | Invitrogen | CLN001 | 23-24 55 65 72 95 120-123 142 171 |
| diaphragm | BioChain | DIA002 | 62 126 153-154 |
| endothelial | Strategene | EDT001 | 1 6-7 10-11 14 16-19 22 24 27 35 |
| cells | | | 37-40 42-43 47 49 52 58 60 62-63 |
| | | | 67 69 72 74 81 90-91 93-101 104 |
| | | | 107-108 120-124 126-133 135-136 |
| | | | 141-142 144-145 151 153-154 156 |
| | | | 160 165 167-168 170-172 |
| esophagus | BioChain | ESO002 | 23 |
| fetal | Clontech | FBR001 | 60 91 |
| brain | | | |
| fetal | Clontech | FBR004 | 1 3 11 22 32 74 |
| brain | | | |
| fetal | Clontech | FBR006 | 1 9-12 14 16 22 29 32-33 36 40 42 |
| brain | | | 45 57 59-60 72 80-81 84 91 94 97-98 |
| | | | 108 111 113-114 119-123 135-137 |
| | | | 143-145 147-148 157 160 166 |
| | | | 169 171-172 |
| fetal | GIBCO | HFB001 | 1-2 6-7 10 13 22-23 27-28 32 37-39 |
| brain | | | 42 44 48 51-52 54 57-58 60 62 |
| | | | 69 72 76 78-80 91 93-95 102 108 |
| | | | 112-114 120-123 126 128 130-132 |
| | | | 135 138-139 144-145 152 155 160-161 |
| | | | 164 167 |
| fetal | Invitrogen | FBT002 | 1 3 8 22-23 40 42 62 74 78 80 84 |
| brain | | | 91 95 98 100-101 108 122 124 136 |
| | | | 142-145 147 160 |
| fetal | Invitrogen | FHR001 | 57 160 |
| heart | | | |
| fetal | Clontech | FKD001 | 7 38 40 60 62 85 87-89 95 147 |
| kidney | | | |
| fetal | Clontech | FKD002 | 42 95 |
| kidney | | | |
| fetal | Invitrogen | FKD007 | 57 62 78 91 95 |
| kidney | | | |
| fetal | Clontech | FLV004 | 41 44 57 62 69 72 95 111 149 169 |
| liver | | | |
| fetal | Invitrogen | FLV001 | 3 18 22 27 34 52 55 57-58 76 78 |
| liver | | | 87-89 91 111 120-121 123 131 136 |
| | | | 144-145 149 168 170 |
| fetal | Soares | FLS001 | 1-3 5-6 10-11 13-14 16-19 23-24 |
| liver- | | | 26-27 29 31 34-35 38-44 46 50-52 |
| spleen | | | 54 57-65 67-70 72 74 76 78-81 84 |
| | | | 86-91 93-98 103-104 106 108 111-112 |
| | | | 117 120-124 126-128 130-133 |
| | | | 135-136 138 141 143-145 147 149 |
| | | | 155-156 160-162 165 167-172 |
| fetal | Soares | FLS002 | 3 5-6 8-10 13 16-19 23-24 26-27 |
| liver- | | | 34-35 37 41 44-45 50-51 53-55 57-58 |
| spleen | | | 62-64 68-70 74-75 79 81 84 87-89 |
| | | | 91 93-94 96 98-99 103-105 108 |
| | | | 111-115 117 119 123-124 126-128 |
| | | | 131-132 134-136 143-148 150 153-154 |
| | | | 156 161-162 164 168 170-172 |
| fetal | Soares | FLS003 | 26 50 53 57 62 76 78 96 149-150 |
| liver- | | | |
| spleen | | | |
| fetal lung | Clontech | FLG001 | 94-95 115 131 149 168 |
| fetal lung | Invitrogen | FLG003 | 1 24 40 57 62 73 76 78 80-81 95 |
| | | | 111 136 153-154 168 |
| fetal | Invitrogen | FMS001 | 24 27 30 54-58 90 94 99 119 123 |
| muscle | | | 131 140 142 147 164 168 |
| fetal | Invitrogen | FMS002 | 42 122 155 |
| muscle | | | |
| fetal skin | Invitrogen | FSK001 | 1 6 18 22-24 27 43 45 52 55 57 60 |
| | | | 62 68-69 78-79 81 91 94-95 97 99 |
| | | | 108 112-114 120-121 142 147 153-154 |
| | | | 161 164-165 167-170 |
| fetal skin | Invitrogen | FSK002 | 1 29 40-41 54-55 62 69 94 96 115 |
| | | | 153-154 |
| fetal | BioChain | FSP001 | 91 95 |
| spleen | | | |
| infant | NULL | IBM002 | 3 11 23 32 128 |
| brain | | | |
| infant | NULL | IBS001 | 44 59 120-121 170 |
| brain | | | |
| infant | Soares | IB2002 | 3 10-13 18-19 22-23 25 27 32 37-40 |
| brain | | | 43 54-55 57 59-63 77-78 84 94 |
| | | | 98-99 102 105 108 120-121 123-124 |
| | | | 127 130 136-137 143-145 152 155-156 |
| | | | 160 164 167-168 170 |
| infant | Soares | IB2003 | 1 3 23 27 37 40 51 60 62 72 99 |
| brain | | | 104 108 111 120-123 128 136 139 |
| | | | 143-145 167 |
| leukocytes | Clontech | LUC003 | 1-2 38 62 76 84 94 97 128 136 161 |
| | | | 165 172 |
| leukocytes | GIBCO | LUC001 | 2 6-8 11 13-14 16 18-19 22-24 27-28 |
| | | | 37-38 44-45 52-53 57-58 60 62 |
| | | | 67 69-70 74 76 78-81 84 90-91 93-95 |
| | | | 97-101 107-114 122-123 126-128 |
| | | | 130-132 135-136 138-139 141 143 |
| | | | 147 156-157 161-162 165-167 |
| lung | 37 62-63 | | |
| | 69 87-89 | | |
| | 108 124 | | |
| | 126-127 | | |
| | 144-145 | | |
| | 166 168 | | |
| lung | Strategene | LFB001 | 1-2 6-7 10 14 19 |
| lymph node | Clontech | ALN001 | 6 19 34 39 62 80 90 93 95 112-114 |
| | | | 127 143 162 |
| lymphocyte | ATCC | LPC001 | 37-38 43 51 55 57 62 70 72 76 78-79 |
| | | | 90 94-95 97 108 112 119 122 |
| | | | 132 143 146 165-166 |
| macrophage | Invitrogen | HMP001 | 113-114 |
| mammary | Invitrogen | MMG001 | 1-2 8 13-14 18 22-23 27 33 40 43 |
| gland | | | 52 55 58-60 70 74 84 86-90 93 95 |
| | | | 97 99-101 104 107-108 111 113-114 |
| | | | 120-121 123 131 136 142-145 147 |
| | | | 149 153-154 160 165 167-169 172 |
| melanoma | Clontech | MEL004 | 2 6 40 42 51 60 62-63 67 74 91 |
| | | | 100-101 107 112 136 161 168 170 |
| mix | NULL | SUP005 | 26 40 52 57 62 78 95 149 153-154 |
| mix | NULL | SUP008 | 1 57 78 84 120-121 |
| mix | NULL | SUP009 | 26 40 44 57 76 78 144-145 153-154 |
| mixed | EST | CGd010 | 34 |
| mixed | NULL | CGd012 | 11 25-26 31 33-34 39 75 147 157 |
| | | | 163 |
| mixed | NULL | CGd013 | 26 |
| mixed | NULL | CGd015 | 25-26 39 44 47 52 148 153-154 160 |
| mixed | NULL | CGd016 | 147 |
| neuron | Strategene | NTD001 | 6 23 47 49 60 74 81 94-95 113-114 |
| | | | 129-130 133 135 138 151 166 |
| neuron | Strategene | NTR001 | 6 59 91 95 128 136 148 |
| neuronal | Strategene | NTU001 | 14 23 55 59 95 100-101 108 111-112 |
| cells | | | 122 132-133 136 151 168 170 |
| ovary | Invitrogen | AOV001 | 1-3 6-9 11 14 16-19 21-23 27-29 |
| | | | 37-38 40-45 51-52 54 58-60 62-63 |
| | | | 67 72 74-76 79 81 86-91 93-97 |
| | | | 100-101 103 105 107-108 111-115 |
| | | | 119-124 126-128 130-132 135 138 |
| | | | 141 144-145 147 150 152-156 160-161 |
| | | | 165 167-169 172 |
| pituitary | Clontech | PIT004 | 2 34 57 62 74 78 |
| gland | | | |
| placenta | Invitrogen | APL001 | 42 59 95 148 |
| placenta | Invitrogen | APL002 | 24 33-34 62 76 87-90 95 99 122 |
| | | | 131 136 143 165 167 |
| prostate | Clontech | PRT001 | 6 17 37-38 54 62-63 65-66 72 76 |
| | | | 87-89 97 105 160 172 |
| rectum | Invitrogen | REC001 | 22 24 34 54 95 97 122 168 |
| salivary | Clontech | SAL001 | 6 59 87-89 91 107-108 131 138 |
| gland | | | 144-145 150 160 |
| skeletal | Clonetech | SKMS03 | 153-154 |
| muscle | | | |
| skeletal | Clontech | SKM001 | 1 56-57 81 86 90-91 94 123 153-155 |
| muscle | | | |
| skeletal | NULL | SKMS04 | 38 |
| muscle | | | |
| skin | ATCC | SFB001 | 72 95 |
| fibroblast | | | |
| skin | ATCC | SFB003 | 62 95-96 |
| fibroblast | | | |
| small | Clontech | SIN001 | 2 25 33 37-40 54 62 65 70 74 80-81 |
| intestine | | | 84 86 90 136 143 153-155 160 |
| | | | 164 168-169 172 |
| spinal | Clontech | SPC001 | 3 6 12 37-39 55 57-58 70 74 76 84 |
| cord | | | 91 94-95 98 104 113-114 126 132 |
| | | | 138 157 160 168 |
| stomach | Clontech | STO001 | 1 25 33 35 39 43 74 95 132 |
| testis | GIBCO | ATS001 | 1 14 17-18 38 44 46 60 74 76 81 |
| | | | 91 94-95 111 115 126 128 132 139 |
| | | | 152-154 156 160 168-169 172 |
| thalamus | Clontech | THA002 | 5 18 22 24 41 43 52 65 84 99 104 |
| | | | 110 123 144-146 158 |
| thymus | Clonetech | THM001 | 6 9 18-19 34 38 41-42 45 52-54 63 |
| | | | 69 84 94-96 99 112 127-228 130-131 |
| | | | 141 160 170 172 |
| thymus | Clontech | THMc02 | 1 3 7 9 16 23 27 35 40 44 51-53 |
| | | | 62-63 72 81 84 86-90 94-95 99-101 |
| | | | 115 123 128 132 141 143-145 148 |
| | | | 167 169-171 |
| thyroid | Clontech | THR001 | 1 3 6 16-19 22 29 35 38 42 45 52 |
| gland | | | 54 56 58 60-63 74 76 81 84 87-89 |
| | | | 91 93-95 97 99-101 105 107-108 |
| | | | 111 113-114 122-123 126-128 131 |
| | | | 135-136 141 144-145 147 160-162 |
| | | | 164-165 168 172 |
| trachea | Clontech | TRC001 | 5 69 76 80 90-91 93 113-114 166 |
| umbilical | BioChain | FUC001 | 6-7 10-11 14 22 29 41 43 51 57 62 |
| cord | | | 74 76 78 80-81 91 94 97 105 110 |
| | | | 115 124 131-132 141 144-145 150 |
| | | | 160 165 168-169 171-172 |
| uterus | Clontech | UTR001 | 37 52 67 76 81 95 108 112 118 142 |
| | | | 168 |
| young | GIBCO | ALV001 | 2 26 29 38 52 54 63 72 74 95-97 |
| liver | | | 99 104 108 111 120-121 123 149 |
| | | | 156 164 169 172 |

[0454] TABLE 2

| SEQ | | | | SMITH- | |
|---|---|---|---|---|---|
| ID | ACCESSION | | | WATERMAN | |
| NO: | NUMBER | SPECIES | DESCRIPTION | SCORE | % IDENTITY |
| 1 | W80293 | Homo sapiens | Human translocation | 1016 | 96 |
| | | | associated protein | | |
| | | | designated Gp25L-H. | | |
| 2 | M74089 | Homo sapiens | TB1 | 2226 | 99 |
| 3 | D88827 | Homo sapiens | zinc finger protein FPM315 | 447 | 46 |
| 4 | Z34818 | Homo sapiens | voltage-dependent L-type | 1363 | 96 |
| | | | Ca channel alpha 1 subunit | | |
| 5 | U60269 | Homo sapiens | putative envelope protein; | 370 | 98 |
| | | | orf similar to env of Type A | | |
| | | | and Type B retroviruses and | | |
| | | | to class II HERVs | | |
| 6 | Z47087 | Homo sapiens | RNA polymerase II | 865 | 100 |
| | | | elongation factor-like | | |
| | | | protein | | |
| 7 | AL078461 | Homo sapiens | dJ901O8.1 (continues in | 782 | 97 |
| | | | dJ1121G12 (AL109965)) | | |
| 8 | X93357 | Mus musculus | homolog of human SYT | 870 | 53 |
| 9 | AF227156 | Homo sapiens | RRN3 | 1679 | 98 |
| 10 | AC004908 | Homo sapiens | similar to ribosomal protein | 377 | 94 |
| | | | L23a; similar to P29316 | | |
| | | | (PID: g132848) | | |
| 11 | U10556 | Saccharomyces | Yhr085 wp | 175 | 31 |
| | | cerevisiae | | | |
| 12 | M29581 | Homo sapiens | zinc finger protein 8 (ZFP8) | 2949 | 99 |
| 13 | M64788 | Homo sapiens | GTPase activating protein | 1235 | 55 |
| 14 | AK026016 | Homo sapiens | unnamed protein product | 1846 | 100 |
| 15 | G00637 | Homo sapiens | Human secreted protein, | 166 | 64 |
| | | | SEQ ID NO: 4718. | | |
| 16 | AF201941 | Homo sapiens | DC8 | 1226 | 100 |
| 17 | Z83826 | Homo sapiens | dJ473B4.1 (novel protein | 1083 | 100 |
| | | | similar to predicted human | | |
| | | | and worm genes) | | |
| 18 | AB031052 | Homo sapiens | vaccinia related kinase 3 | 2521 | 100 |
| 19 | AL050091 | Homo sapiens | hypothetical protein | 1011 | 100 |
| 20 | AF090931 | Homo sapiens | PRO0483 | 137 | 65 |
| 21 | U39320 | Rattus norvegicus | cysteine string protein | 747 | 68 |
| 22 | Y66718 | Homo sapiens | Membrane-bound protein | 1554 | 70 |
| | | | PRO1106. | | |
| 24 | AE003612 | Drosophila | CG12393 gene product | 244 | 36 |
| | | melanogaster | | | |
| 25 | V00662 | Homo sapiens | ATPase 6 | 232 | 100 |
| 26 | T12920_cd1 | Homo sapiens | 11-AUG-1994 Human | 731 | 100 |
| | | | serum albumin gene with | | |
| | | | restriction site between | | |
| | | | domains 2 and 3. | | |
| 27 | AL109804 | Homo sapiens | dJ1009E24.3 (A novel | 920 | 100 |
| | | | protein) | | |
| 28 | AL021918 | Homo sapiens | b34I8.1 (Kruppel related | 649 | 54 |
| | | | Zinc Finger protein 184) | | |
| 29 | G01131 | Homo sapiens | Human secreted protein, | 666 | 99 |
| | | | SEQ ID NO: 5212. | | |
| 30 | Y73373 | Homo sapiens | HTRM clone 921803 | 1225 | 100 |
| | | | protein sequence. | | |
| 31 | AJ293573 | Homo sapiens | zinc finger protein Cezanne | 2243 | 100 |
| 32 | AF157634 | Homo sapiens | collapsin response mediator | 2943 | 99 |
| | | | protein-5 | | |
| 33 | J00287 | Homo sapiens | pepsinogen | 2032 | 100 |
| 34 | AF264014 | Homo sapiens | scavenger receptor cysteine- | 4523 | 99 |
| | | | rich type 1 protein M160 | | |
| | | | precursor | | |
| 35 | AK024433 | Homo sapiens | FLJ00023 protein | 918 | 100 |
| 36 | AF119855 | Homo sapiens | PRO1847 | 253 | 71 |
| 37 | AF176667 | Xenopus laevis | F-box protein 28 | 426 | 80 |
| 38 | M85148 | Macaca mulatta | cytochrome oxidase subunit | 178 | 68 |
| | | | III | | |
| 39 | R83119 | Homo sapiens | Human cisplatin resistance | 396 | 98 |
| | | | protein. | | |
| 40 | X58521 | Homo sapiens | nucleoporin p62 | 2068 | 99 |
| 41 | Y86211 | Homo sapiens | Nuclear transport protein | 1432 | 87 |
| | | | clone hfb066 protein | | |
| | | | sequence. | | |
| 42 | AL035587 | Homo sapiens | dJ475N16.3 (novel protein | 1243 | 99 |
| | | | similar to RPL7A (60S | | |
| | | | ribosomal protein L7A)) | | |
| 43 | AF233522 | Homo sapiens | gamma-adaptin related | 3196 | 100 |
| | | | protein, GGA2 | | |
| 44 | AF151066 | Homo sapiens | HSPC232 | 1513 | 93 |
| 45 | AF113539 | Homo sapiens | hypothalamus protein | 1647 | 99 |
| | | | HT001 | | |
| 46 | AF090901 | Homo sapiens | PRO0195 | 120 | 60 |
| 47 | J02459 | bacteriophage | D (head-DNA | 561 | 99 |
| | | lambda | stabilization; 110) | | |
| 48 | AF068294 | Homo sapiens | HDCMB45P | 234 | 72 |
| 49 | J02459 | bacteriophage | R (cell lysis; 158) | 834 | 100 |
| | | lambda | | | |
| 50 | U71363 | Homo sapiens | zinc finger protein zfp6 | 396 | 47 |
| 51 | AL022393 | Homo sapiens | p373c6.1 | 2751 | 99 |
| 52 | AF257330 | Homo sapiens | COBW-like protein | 1188 | 99 |
| 53 | Y07010 | Homo sapiens | Breast cancer associated | 767 | 98 |
| | | | antigen precursor sequence. | | |
| 54 | AL158056 | Schizosaccharomyces | similar to yeast Ecm29 cell | 813 | 25 |
| | | pombe | wall stucture/biosynthesis | | |
| | | | protein | | |
| 55 | Y44559 | Homo sapiens | Human Rhotekin protein. | 2721 | 100 |
| 56 | D86639 | Mus musculus | stac | 360 | 38 |
| 57 | V00488 | Homo sapiens | alpha globin | 382 | 98 |
| 58 | AL033378 | Homo sapiens | dJ323M4.1 (KIAA0790 | 6030 | 100 |
| | | | protein) | | |
| 59 | AB026111 | Homo sapiens | XAB2 | 4470 | 99 |
| 60 | AB043550 | Mus musculus | neural activity-related ring | 3852 | 99 |
| | | | finger protein | | |
| 61 | D38112 | Homo sapiens | ATPase subunit 6 | 260 | 98 |
| 62 | X15187 | Homo sapiens | precursor polypeptide (AA - | 4112 | 100 |
| | | | 21 to 782) | | |
| 63 | D50369 | Homo sapiens | low molecular mass | 383 | 98 |
| | | | ubiquinone-binding protein | | |
| 64 | AF161356 | Homo sapiens | HSPC093 | 126 | 58 |
| 65 | Z11502 | Homo sapiens | intestine-specific annexin | 1426 | 99 |
| 66 | J03941 | Mus musculus | ferritin heavy chain | 962 | 100 |
| 67 | AB034206 | Homo sapiens | MCT-1 | 962 | 100 |
| 68 | AF118086 | Homo sapiens | PRO1992 | 107 | 58 |
| 69 | AF182416 | Homo sapiens | MDS015 | 1739 | 97 |
| 70 | G03240 | Homo sapiens | Human secreted protein, | 108 | 56 |
| | | | SEQ ID NO: 7321. | | |
| 71 | G00397 | Homo sapiens | Human secreted protein, | 161 | 62 |
| | | | SEQ ID NO: 4478. | | |
| 72 | X76538 | Homo sapiens | hMpv17 | 569 | 100 |
| 73 | AC005626 | Homo sapiens | R29124_1 | 1199 | 97 |
| 74 | G01332 | Homo sapiens | Human secreted protein, | 407 | 87 |
| | | | SEQ ID NO: 5413. | | |
| 75 | Y53883 | Homo sapiens | A suppressor of cytokine | 1250 | 100 |
| | | | signalling protein | | |
| | | | designated HSCOP-3. | | |
| 76 | M34059 | Homo sapiens | beta-globin | 962 | 100 |
| 78 | V00488 | Homo sapiens | alpha globin | 733 | 100 |
| 79 | Z11907_cd1 | Homo sapiens | 19-JAN-1999 Human | 1282 | 100 |
| | | | potassium channel | | |
| | | | K + Hnov28 cDNA (5′ splice | | |
| | | | variant 1). | | |
| 80 | U47924 | Homo sapiens | C10 | 627 | 100 |
| 81 | AF134894 | Homo sapiens | SWAP-70 homolog | 3019 | 100 |
| 82 | AB042027 | Mus musculus | Golgi-associated band 4.1- | 4806 | 93 |
| | | | like protein | | |
| 83 | G03793 | Homo sapiens | Human secreted protein, | 209 | 71 |
| | | | SEQ ID NO: 7874. | | |
| 84 | X83301 | Homo sapiens | SMA5 | 754 | 97 |
| 85 | V00662 | Homo sapiens | URF 2 (NADH | 211 | 91 |
| | | | dehydrogenase subunit) | | |
| 86 | W88627 | Homo sapiens | Secreted protein encoded by | 230 | 69 |
| | | | gene 94 clone HPMBQ32. | | |
| 87 | Y27607 | Homo sapiens | Human secreted protein | 1461 | 100 |
| | | | encoded by gene No. 41. | | |
| 88 | Y27607 | Homo sapiens | Human secreted protein | 1340 | 94 |
| | | | encoded by gene No. 41. | | |
| 89 | Y94295 | Homo sapiens | Human coenzyme A- | 1068 | 100 |
| | | | utilising enzyme CoAEN-3. | | |
| 90 | AL080169 | Homo sapiens | hypothetical protein | 973 | 98 |
| 91 | D14531 | Homo sapiens | ‘human homologue of rat | 974 | 100 |
| | | | ribosomal protein L9’ | | |
| 93 | AC006465 | Homo sapiens | supported by mouse EST | 437 | 100 |
| | | | AA277724 (NID: g1917632) | | |
| | | | and Genscan | | |
| 94 | AL137798 | Homo sapiens | dJ1182A14.5.1 (novel gene | 2075 | 94 |
| | | | (isoform 1)) | | |
| 95 | M77232 | Homo sapiens | ribosomal protein S6 | 706 | 97 |
| 96 | AF261717 | Homo sapiens | SAR1 | 1032 | 100 |
| 97 | X06256 | Homo sapiens | integrin alpha 5 subunit | 5541 | 100 |
| | | | precursor | | |
| 98 | AC004472 | Homo sapiens | P1.11659_5 | 542 | 98 |
| 99 | W85459 | Homo sapiens | Secreted protein encoded by | 1650 | 98 |
| | | | clone dh1135_9. | | |
| 100 | AF201333 | Homo sapiens | delta-tubulin | 2380 | 100 |
| 101 | AF201333 | Homo sapiens | delta-tubulin | 1345 | 100 |
| 102 | AB036836 | Homo sapiens | Carbonic anhydrase-related | 1740 | 100 |
| | | | protein 10 | | |
| 104 | W80748 | Homo sapiens | Human mitochondrial | 1102 | 100 |
| | | | chaperone protein (Hmt- | | |
| | | | GrpE). | | |
| 105 | G00376 | Homo sapiens | Human secreted protein, | 130 | 73 |
| | | | SEQ ID NO: 4457. | | |
| 106 | Y99444 | Homo sapiens | Human PRO1575 | 1241 | 94 |
| | | | (UNQ781) amino acid | | |
| | | | sequence SEQ ID NO: 358. | | |
| 107 | G03787 | Homo sapiens | Human secreted protein, | 232 | 74 |
| | | | SEQ ID NO: 7868. | | |
| 108 | AJ237734 | Homo sapiens | ribophorin II | 2619 | 100 |
| 110 | Y99349 | Homo sapiens | Human PRO1110 | 1683 | 100 |
| | | | (UNQ553) amino acid | | |
| | | | sequence SEQ ID NO: 31. | | |
| 111 | AF258341 | Homo sapiens | NADPH-cytochrome P450 | 3540 | 99 |
| | | | reductase | | |
| 112 | AB044547 | Homo sapiens | heterogeneous nuclear | 3178 | 99 |
| | | | ribonucleoprotein L | | |
| 113 | AF067804 | Homo sapiens | HDCMC04P | 2124 | 94 |
| 114 | AF067804 | Homo sapiens | HDCMC04P | 2219 | 97 |
| 115 | U73778 | Homo sapiens | collagen type XII alpha-1 | 16043 | 99 |
| 116 | G02922 | Homo sapiens | Human secreted protein, | 120 | 69 |
| | | | SEQ ID NO: 7003. | | |
| 118 | G03133 | Homo sapiens | Human secreted protein, | 175 | 59 |
| | | | SEQ ID NO: 7214. | | |
| 119 | AF115345 | Homo sapiens | calcium-regulated heat | 282 | 100 |
| | | | stable protein CRHSP-24 | | |
| 120 | AF265228 | Homo sapiens | DNMT1 associated protein-1 | 2422 | 100 |
| 121 | AF265228 | Homo sapiens | DNMT1 associated protein-1 | 1320 | 85 |
| 122 | AB018189 | Xenopus laevis | NO27 | 907 | 76 |
| 123 | AB033603 | Homo sapiens | cop9 complex subunit 7a | 1364 | 100 |
| 124 | AL121805 | Drosophila | BACN4L24.f | 200 | 32 |
| | | melanogaster | | | |
| 125 | Y03000 | Homo sapiens | Fragment of human secreted | 153 | 72 |
| | | | protein encoded by gene | | |
| | | | 121. | | |
| 126 | D38112 | Homo sapiens | NADH dehydrogenase | 448 | 90 |
| | | | subunit 4L | | |
| 127 | AL050091 | Homo sapiens | hypothetical protein | 1011 | 100 |
| 128 | AK023702 | Homo sapiens | unnamed protein product | 2774 | 100 |
| 129 | J02459 | bacteriophage | M (tail component; 109) | 578 | 100 |
| | | lambda | | | |
| 130 | AF116272 | Homo sapiens | T-cell activation protein | 532 | 85 |
| 131 | W74836 | Homo sapiens | Human secreted protein | 655 | 100 |
| | | | encoded by gene 108 clone | | |
| | | | HEBEK93. | | |
| 132 | AF146793 | Mus musculus | PDCL2 | 705 | 58 |
| 133 | J02459 | bacteriophage | W (head-tail joining; 68) | 336 | 100 |
| | | lambda | | | |
| 134 | AB011539 | Homo sapiens | MEGF6 | 131 | 58 |
| 135 | G00827 | Homo sapiens | Human secreted protein, | 523 | 98 |
| | | | SEQ ID NO: 4908. | | |
| 136 | Y35969 | Homo sapiens | Extended human secreted | 1777 | 99 |
| | | | protein sequence, SEQ ID | | |
| | | | NO. 218. | | |
| 137 | AB007861 | Homo sapiens | KIAA0401 | 1856 | 100 |
| 138 | AK000529 | Homo sapiens | unnamed protein product | 1027 | 91 |
| 139 | A17783 | unidentified | NC28 | 583 | 100 |
| 140 | Y73373 | Homo sapiens | HTRM clone 921803 | 561 | 100 |
| | | | protein sequence. | | |
| 141 | D00762 | Homo sapiens | proteasome subunit C8 | 686 | 93 |
| 142 | X76091 | Homo sapiens | DNA binding protein RFX2 | 3747 | 99 |
| 143 | AK000004 | Homo sapiens | FLJ00004 protein | 3106 | 96 |
| 144 | Y73377 | Homo sapiens | HTRM clone 1645941 | 852 | 41 |
| | | | protein sequence. | | |
| 145 | Y73377 | Homo sapiens | HTRM clone 1645941 | 591 | 45 |
| | | | protein sequence. | | |
| 146 | U12329 | Cricetulus griseus | mutant sterol regulatory | 373 | 94 |
| | | | element binding protein-2 | | |
| 147 | U80735 | Homo sapiens | CAGF28 | 3779 | 97 |
| 148 | Y91577 | Homo sapiens | Human secreted protein | 155 | 96 |
| | | | sequence encoded by gene 2 | | |
| | | | SEQ ID NO: 250. | | |
| 149 | X00129 | Homo sapiens | precursor RBP | 1005 | 96 |
| 150 | X97675 | Homo sapiens | plakophilin 2a | 4288 | 99 |
| 151 | J02459 | bacteriophage | I (tail component; 223) | 1111 | 99 |
| | | lambda | | | |
| 152 | Y94702 | Homo sapiens | Human androgen shutoff | 839 | 100 |
| | | | gene 3 (AS3) protein | | |
| | | | sequence. | | |
| 153 | X95325 | Homo sapiens | DNA-binding protein | 1975 | 100 |
| 154 | AF171061 | Canis familiaris | Y-box protein ZONAB-A | 1426 | 89 |
| 155 | X99584 | Homo sapiens | SMT3A protein | 522 | 98 |
| 156 | Y99397 | Homo sapiens | Human PRO1298 | 1554 | 100 |
| | | | (UNQ666) amino acid | | |
| | | | sequence SEQ ID NO: 210. | | |
| 157 | X78926 | Homo sapiens | zinc finger protein | 426 | 50 |
| 158 | J02459 | bacteriophage | E (capsid component; 341) | 1754 | 100 |
| | | lambda | | | |
| 159 | G02922 | Homo sapiens | Human secreted protein, | 160 | 48 |
| | | | SEQ ID NO: 7003. | | |
| 160 | AF157317 | Homo sapiens | AD-015 protein | 869 | 100 |
| 161 | Y36495 | Homo sapiens | Fragment of human secreted | 111 | 67 |
| | | | protein encoded by gene 27. | | |
| 162 | Y94870 | Homo sapiens | Human protein clone | 1707 | 100 |
| | | | HP02545. | | |
| 163 | AF204172 | Homo sapiens | popeye protein 1 | 1872 | 98 |
| 164 | B01391 | Homo sapiens | Neuron-associated protein. | 376 | 58 |
| 165 | Z99259 | Schizosaccharomyces | putative phosphotransferase | 396 | 43 |
| | | pombe | | | |
| 166 | U28831 | Homo sapiens | protein that is immuno- | 518 | 55 |
| | | | reactive with anti-PTH | | |
| | | | polyclonal antibodies | | |
| 167 | AF225419 | Homo sapiens | HSCARG | 1546 | 100 |
| 168 | X04412 | Homo sapiens | plasma gelsolin | 4101 | 100 |
| 169 | X13482 | Homo sapiens | U2 snRNP-specific A′ | 1284 | 99 |
| | | | protein (AA 1-255) | | |
| 170 | X59618 | Homo sapiens | small subunit ribonucleotide | 1389 | 100 |
| | | | reductase | | |
| 171 | AC004882 | Homo sapiens | similar to cytochrome Bc1 J | 326 | 100 |
| | | | chain; similar to 1BGY | | |
| | | | (PID: g4139401) | | |
| 172 | AL034374 | Homo sapiens | dJ483K16.1.1 (novel protein | 1651 | 100 |
| | | | (isoform 1)) | | |

[0455] TABLE 3

| SEQ ID | ACCESSION | | |
|---|---|---|---|
| NO: | NUMBER | DESCRIPTION | RESULTS |
| 1 | PF01105 | emp24/gp25L/p24 family. | PF01105B 25.12 1.257e−39 170-222 |
| 2 | BL00215 | Mitochondrial energy | BL00215B 10.44 1.900e−09 481-494 |
| | | transfer proteins. | |
| 3 | PD00066 | PROTEIN ZINC-FINGER | PD00066 13.92 6.400e−16 427-440 |
| | | METAL-BINDI. | PD00066 13.92 7.923e−15 371-384 |
| | | | PD00066 13.92 4.600e−14 343-356 |
| | | | PD00066 13.92 3.500e−13 399-412 |
| 4 | PR00167 | CALCIUM CHANNEL | PR00167D 13.86 3.400e−34 374-401 |
| | | SIGNATURE | PR00167E 20.54 2.800e−27 1018-1039 |
| | | | PR00167F 16.75 4.000e−20 1551-1566 |
| | | | PR00167G 10.89 5.050e−16 1599-1612 |
| | | | PR00167D 13.86 3.778e−12 1599-1626 |
| 6 | BL00517 | Ribonuclease III family | BL00517C 7.29 9.386e−10 98-112 |
| | | proteins. | |
| 8 | PR00209 | ALPHA/BETA GLIADIN | PR00209B 4.88 5.500e−09 325-344 |
| | | FAMILY SIGNATURE | |
| 10 | PR00925 | NONHISTONE | PR00925B 3.73 3.089e−10 11-24 |
| | | CHROMOSOMAL | |
| | | PROTEIN HMG17 | |
| | | FAMILY SIGNATURE | |
| 12 | PD01066 | PROTEIN ZINC FINGER | PD01066 19.43 8.953e−31 27-66 |
| | | ZINC-FINGER METAL- | |
| | | BINDING NU. | |
| 14 | PF00521 | DNA | PF00521G 18.47 7.904e−09 58-92 |
| | | gyrase/topoisomerase IV, | |
| | | subunit A. | |
| 18 | BL00107 | Protein kinases ATP- | BL00107A 18.39 7.207e−11 296-327 |
| | | binding region proteins. | |
| 21 | PR00625 | DNAJ PROTEIN | PR00625A 12.84 2.750e−19 30-50 |
| | | FAMILY SIGNATURE | PR00625B 13.48 4.490e−15 61-82 |
| 22 | PR00927 | ADENINE | PR00927B 14.66 6.262e−11 315-337 |
| | | NUCLEOTIDE | PR00927E 14.93 3.160e−09 313-335 |
| | | TRANSLOCATOR 1 | |
| | | SIGNATURE | |
| 26 | PR00802 | SERUM ALBUMIN | PR00802C 12.28 2.370e−11 106-124 |
| | | FAMILY SIGNATURE | PR00802G 14.57 8.734e−09 92-115 |
| 28 | PR00048 | C2H2-TYPE ZINC | PR00048A 10.52 5.500e−13 64-78 |
| | | FINGER SIGNATURE | PR00048A 10.52 7.429e−13 149-163 |
| | | | PR00048A 10.52 1.000e−11 35-49 |
| | | | PR00048B 6.02 6.538e−11 137-147 |
| | | | PR00048A 10.52 6.684e−11 121-135 |
| | | | PR00048B 6.02 2.421e−09 80-90 |
| 30 | PR00988 | URIDINE KINASE | PR00988A 6.39 8.905e−09 2-20 |
| | | SIGNATURE | |
| 31 | BL00315 | Dehydrins proteins. | BL00315A 9.35 8.119e−09 41-69 |
| 33 | PR00792 | PEPSIN (A1) ASPARTIC | PR00792A 11.54 6.250e−23 82-103 |
| | | PROTEASE FAMILY | PR00792D 12.74 5.200e−18 361-377 |
| | | SIGNATURE | PR00792B 12.78 7.750e−14 225-239 |
| | | | PR00792C 9.10 1.000e−12 274-286 |
| 34 | BL00420 | Speract receptor repeat | BL00420B 22.67 3.089e−38 408-463 |
| | | proteins domain proteins. | BL00420B 22.67 8.875e−38 618-673 |
| | | | BL00420B 22.67 6.143e−24 272-327 |
| | | | BL00420B 22.67 7.692e−23 167-222 |
| | | | BL00420B 22.67 3.778e−21 62-117 |
| | | | BL00420B 22.67 7.253e−15 515-570 |
| | | | BL00420C 11.90 1.900e−12 493-504 |
| | | | BL00420C 11.90 3.700e−12 703-714 |
| | | | BL00420C 11.90 9.250e−12 40-51 |
| 39 | BL00667 | Respiratory-chain NADH | BL00667A 20.80 1.000e−40 22-74 |
| | | dehydrogenase subunit 1 | |
| | | proteins. | |
| 41 | BL01160 | Kinesin light chain repeat | BL01160B 19.54 8.703e−10 407-461 |
| | | proteins. | BL01160B 19.54 2.373e−09 414-468 |
| 42 | BL00634 | Ribosomal protein L30 | BL00634 34.38 7.796e−20 100-151 |
| | | proteins. | |
| 50 | PD01066 | PROTEIN ZINC FINGER | PD01066 19.43 9.842e−24 16-55 |
| | | ZINC-FINGER METAL- | |
| | | BINDING NU. | |
| 51 | PD00066 | PROTEIN ZINC-FINGER | PD00066 13.92 8.200e−16 362-375 |
| | | METAL-BINDI. | PD00066 13.92 4.462e−15 334-347 |
| | | | PD00066 13.92 8.615e−15 473-486 |
| | | | PD00066 13.92 5.200e−14 306-319 |
| | | | PD00066 13.92 3.000e−13 390-403 |
| 53 | BL01160 | Kinesin light chain repeat | BL01160B 19.54 8.093e−09 586-640 |
| | | proteins. | |
| 54 | PF00956 | Nuclesosome assembly | PF00956B 23.14 2.534e−09 896-937 |
| | | protein (NAP). | |
| 56 | BL00479 | Phorbol esters/ | BL00479A 19.86 6.400e−13 90-113 |
| | | diacylglycerol binding | BL00479B 12.57 5.860e−10 116-132 |
| | | domain proteins. | |
| 57 | BL01033 | Globins profile. | BL01033A 16.94 3.250e−20 26-48 |
| 58 | PR00910 | LUTEOVIRUS ORF6 | PR00910A 2.51 4.321e−09 9-22 |
| | | PROTEIN SIGNATURE | |
| 60 | BL00518 | Zinc finger, C3HC4 type | BL00518 12.23 9.143e−10 65-74 |
| | | (RING finger), proteins. | |
| 61 | BL00449 | ATP synthase a subunit | BL00449C 13.17 3.813e−21 32-55 |
| | | proteins. | |
| 62 | BL00298 | Heat shock hsp90 proteins | BL00298A 10.97 1.000e−40 74-119 |
| | | family proteins. | BL00298E 27.30 1.000e−40 321-376 |
| | | | BL00298F 11.21 1.000e−40 409-464 |
| | | | BL00298H 20.50 1.000e−40 553-607 |
| | | | BL00298C 16.40 2.286e−40 186-230 |
| | | | BL00298B 15.64 1.290e−39 134-181 |
| | | | BL00298G 24.57 5.345e−39 465-520 |
| | | | BL00298I 30.07 7.818e−34 661-715 |
| | | | BL00298D 17.97 6.226e−33 242-282 |
| 65 | BL00223 | Annexins repeat proteins | BL00223C 24.79 1.000e−40 208-263 |
| | | domain proteins. | BL00223B 28.47 9.679e−39 131-181 |
| | | | BL00223A 15.59 6.000e−27 62-96 |
| | | | BL00223C 24.79 1.000e−16 49-104 |
| | | | BL00223A 15.59 2.306e−16 221-255 |
| 66 | BL00540 | Ferritin iron-binding | BL00540A 15.06 1.000e−40 9-50 |
| | | regions proteins. | BL00540B 18.82 1.000e−40 100-155 |
| | | | BL00540C 13.00 7.500e−15 165-177 |
| 73 | DM00372 | CARCINOEMBRYONIC | DM00372A 19.18 2.800e−22 19-64 |
| | | ANTIGEN PRECURSOR | DM00372B 20.31 2.523e−19 83-128 |
| | | AMINO-TERMINAL | |
| | | DOMAIN. | |
| 74 | PD01168 | SYNTHETASE LIGASE | PD01168L 9.47 4.500e−09 369-384 |
| | | PROTEIN ALANYL. | |
| 76 | BL01033 | Globins profile. | BL01033A 16.94 7.923e−18 25-47 |
| | | | BL01033B 13.81 1.000e−15 93-105 |
| 78 | BL01033 | Globins profile. | BL01033A 16.94 3.250e−20 283-305 |
| | | | BL01033B 13.81 7.000e−14 345-357 |
| 79 | PR00169 | POTASSIUM CHANNEL | PR00169A 16.77 2.075e−11 55-75 |
| | | SIGNATURE | |
| 81 | PF00992 | Troponin. | PF00992A 16.67 6.921e−09 417-452 |
| 82 | PR00935 | BAND 4.1 PROTEIN | PR00935D 10.20 7.833e−09 240-257 |
| | | FAMILY SIGNATURE | |
| 87 | BL00166 | Enoyl-CoA | BL00166D 22.87 7.250e−20 177-213 |
| | | hydratase/isomerase | BL00166C 18.93 2.537e−19 126-153 |
| | | proteins. | BL00166B 16.92 5.500e−09 80-102 |
| 88 | BL00166 | Enoyl-CoA | BL00166D 22.87 7.250e−20 177-213 |
| | | hydratase/isomerase | BL00166C 18.93 2.537e−19 126-153 |
| | | proteins. | BL00166B 16.92 5.500e−09 80-102 |
| 89 | BL00166 | Enoyl-CoA | BL00166D 22.87 7.250e−20 146-182 |
| | | hydratase/isomerase | BL00166B 16.92 5.500e−09 80-102 |
| | | proteins. | |
| 91 | BL00700 | Ribosomal protein L6 | BL00700B 18.26 1.000e−40 162-201 |
| | | proteins 2. | BL00700D 21.51 1.000e−40 241-285 |
| | | | BL00700A 19.34 9.308e−33 108-146 |
| | | | BL00700C 11.76 4.000e−13 212-222 |
| 95 | BL00578 | Ribosomal protein S6e | BL00578B 15.15 1.000e−40 39-90 |
| | | proteins. | BL00578A 14.24 2.800e−37 1-32 |
| 96 | BL01020 | SAR1 family proteins. | BL01020C 15.35 1.000e−40 83-134 |
| | | | BL01020D 19.09 8.071e−40 159-198 |
| | | | BL01020B 11.70 6.750e−38 41-76 |
| | | | BL01020A 11.87 1.400e−28 7-38 |
| 97 | BL00242 | Integrins alpha chain | BL00242C 16.86 4.176e−30 319-349 |
| | | proteins. | BL00242E 9.03 3.864e−27 1000-1029 |
| | | | BL00242D 13.57 4.706e−26 391-416 |
| | | | BL00242D 13.57 7.407e−13 455-480 |
| | | | BL00242A 13.80 2.500e−11 92-104 |
| | | | BL00242B 8.13 4.913e−11 222-232 |
| | | | BL00242D 13.57 3.700e−10 324-349 |
| 100 | BL00227 | Tubulin subunits alpha, | BL00227C 25.48 2.525e−23 114-166 |
| | | beta, and gamma proteins. | BL00227F 21.16 5.610e−12 400-454 |
| 101 | BL00227 | Tubulin subunits alpha, | BL00227C 25.48 2.525e−23 114-166 |
| | | beta, and gamma proteins. | BL00227F 21.16 5.610e−12 298-352 |
| 102 | BL00162 | Eukaryotic-type carbonic | BL00162C 17.78 1.000e−19 126-163 |
| | | anhydrases proteins. | BL00162E 14.93 5.922e−16 231-264 |
| | | | BL00162D 15.06 7.864e−12 165-190 |
| | | | BL00162F 22.68 7.750e−11 268-302 |
| | | | BL00162A 22.92 3.282e−10 54-85 |
| 104 | BL01071 | grpE protein. | BL01071A 24.88 2.674e−23 76-122 |
| | | | BL01071B 18.21 6.447e−16 191-215 |
| 106 | PR00002 | BONE MATRIX GLA | PR00002A 11.56 1.750e−16 481-498 |
| | | DOMAIN SIGNATURE | PR00002B 8.36 7.632e−13 500-511 |
| 111 | PR00369 | FLAVODOXIN | PR00369D 20.20 7.261e−16 192-212 |
| | | SIGNATURE | PR00369A 11.29 7.600e−14 84-98 |
| | | | PR00369C 11.27 8.313e−12 168-179 |
| | | | PR00369B 13.29 1.600e−11 137-149 |
| 112 | PD02784 | PROTEIN NUCLEAR | PD02784B 26.46 4.713e−16 227-270 |
| | | RIBONUCLEOPROTEIN. | |
| 113 | PF00856 | SET domain proteins. | PF00856B 16.42 3.302e−17 382-404 |
| | | | PF00856A 26.14 3.714e−15 129-166 |
| 114 | PF00856 | SET domain proteins. | PF00856B 16.42 3.302e−17 395-417 |
| | | | PF00856A 26.14 3.714e-15 129-166 |
| 115 | PR00453 | VON WILLEBRAND | PR00453A 12.79 5.737e−17 1198-1216 |
| | | FACTOR TYPE A | PR00453A 12.79 3.571e−16 439-457 |
| | | DOMAIN SIGNATURE | PR00453A 12.79 5.125e−15 139-157 |
| | | | PR00453A 12.79 1.563e−13 2322-2340 |
| | | | PR00453B 14.65 7.667e−13 178-193 |
| | | | PR00453B 14.65 7.818e−12 1237-1252 |
| | | | PR00453B 14.65 9.455e−12 2362-2377 |
| | | | PR00453B 14.65 1.243e−11 478-493 |
| | | | PR00453C 12.26 4.462e−10 2428-2437 |
| | | | PR00453C 12.26 9.308e−10 544-553 |
| 122 | DM00668 | ZEIN. | DM00668C 8.89 8.794e−09 24-48 |
| 126 | PF00420 | NADH- | PF00420B 16.51 4.150e−31 61-97 |
| | | ubiquinone/plastoquinone | PF00420A 16.63 3.571e−24 12-43 |
| | | oxidoreductase chain 4L. | |
| 128 | BL00405 | 43 Kd postsynaptic | BL00405G 7.78 9.919e−10 285-322 |
| | | protein. | |
| 134 | PR00011 | TYPE III EGF-LIKE | PR00011D 14.03 2.108e−10 18-37 |
| | | SIGNATURE | PR00011B 13.08 6.055e−09 18-37 |
| | | | PR00011A 14.06 6.178e−09 18-37 |
| 139 | BL00472 | Small cytokines | BL00472C 20.76 6.850e−34 65-102 |
| | | (intercrine/chemokine) C- | BL00472B 14.67 8.579e−15 44-62 |
| | | C subfamily signatur. | BL00472A 7.45 2.895e−11 11-23 |
| 140 | PR00988 | URIDINE KINASE | PR00988A 6.39 8.905e−09 2-20 |
| | | SIGNATURE | |
| 141 | BL00388 | Proteasome A-type | BL00388A 23.14 5.500e−39 8-54 |
| | | subunits proteins. | BL00388B 31.38 1.310e−27 66-108 |
| | | | BL00388C 18.79 3.842e−10 121-143 |
| 142 | PD02699 | PROTEIN DNA- | PD02699C 24.84 1.000e−40 614-661 |
| | | BINDING BINDING | PD02699A 8.91 3.250e−35 235-264 |
| | | DNA. | PD02699B 18.28 6.571e−21 500-524 |
| 143 | DM01970 | 0 kw ZK632.12 YDR313C | DM01970B 8.60 2.612e−13 551-564 |
| | | ENDOSOMAL III. | |
| 144 | PR00624 | HISTONE H5 | PR00624G 4.08 6.900e−09 180-200 |
| | | SIGNATURE | |
| 146 | BL00038 | Myc-type, ‘helix-loop- | BL00038B 16.97 9.027e−10 57-78 |
| | | helix’ dimerization domain | |
| | | proteins. | |
| 147 | PR00209 | ALPHA/BETA GLIADIN | PR00209B 4.88 4.494e−12 393-412 |
| | | FAMILY SIGNATURE | |
| 149 | PR00179 | LIPOCALIN | PR00179B 9.56 2.895e−13 128-141 |
| | | SIGNATURE | PR00179A 13.78 3.250e−11 40-53 |
| | | | PR00179C 19.02 6.040e−11 158-174 |
| 152 | PR00929 | AT-HOOK-LIKE | PR00929C 5.26 8.759e−09 55-66 |
| | | DOMAIN SIGNATURE | |
| 153 | BL00352 | ‘Cold-shock’ DNA-binding | BL00352B 23.66 5.886e−25 119-158 |
| | | domain proteins. | BL00352A 12.19 1.429e−17 93-108 |
| 154 | BL00352 | ‘Cold-shock’ DNA-binding | BL00352B 23.66 5.886e−25 119-158 |
| | | domain proteins. | BL00352A 12.19 1.429e−17 93-108 |
| 155 | BL00299 | Ubiquitin domain proteins. | BL00299 28.84 2.250e−25 32-84 |
| 156 | PF00534 | Glycosyl transferases | PF00534B 14.47 8.364e−15 325-349 |
| | | group 1. | |
| 157 | BL00028 | Zinc finger, C2H2 type, | BL00028 16.07 8.615e−11 46-63 |
| | | domain proteins. | |
| 164 | BL00880 | Acyl-CoA-binding protein. | BL00880 17.52 8.875e−34 46-96 |
| 168 | BL00740 | MAM domain proteins. | BL00740B 19.76 3.813e−09 690-711 |
| 170 | BL00368 | Ribonucleotide reductase | BL00368A 36.98 1.000e−40 84-139 |
| | | small subunit proteins. | BL00368B 22.06 5.846e−26 161-187 |
| 172 | BL01188 | GNS1/SUR4 family | BL01188C 22.65 6.667e−10 154-205 |
| | | proteins. | |

[0456] TABLE 4

| SEQ ID | | | | PFAM |
|---|---|---|---|---|
| NO: | PFAM NAME | DESCRIPTION | p-value | SCORE |
| 1 | EMP24_GP25L | emp24/gp25L/p24 family | 6.4e−90 | 312.2 |
| 2 | mito_carr | Mitochondrial carrier proteins | 1.1e−09 | 36.2 |
| 3 | SCAN | SCAN domain | 1e−56 | 201.9 |
| 4 | ion_trans | Ion transport protein | 5.5e−260 | 877.1 |
| 6 | Skp1 | Skp1 family | 2.2e−64 | 227.3 |
| 12 | zf-C2H2 | Zinc finger, C2H2 type | 3.2e−53 | 190.2 |
| 13 | Rap_GAP | Rap/ran-GAP | 5.4e−117 | 402.1 |
| 17 | MSP_domain | MSP (Major sperm protein) domain | 2.9e−10 | 47.5 |
| 18 | pkinase | Eukaryotic protein kinase domain | 0.022 | 12.5 |
| 21 | DnaJ | DnaJ domain | 2.4e−34 | 127.5 |
| 22 | mito_carr | Mitochondrial carrier proteins | 1.1e−85 | 296.7 |
| 24 | PH | PH domain | 2.4e−14 | 56.3 |
| 26 | transport_prot | Serum albumin family | 2.4e−06 | 11.0 |
| 28 | zf-C2H2 | Zinc finger, C2H2 type | 2.7e−22 | 87.5 |
| 31 | zf-A20 | A20-like zinc finger | 0.0056 | 23.3 |
| 32 | Dihydrooratase | Dihydroorotase-like | 7.6e−88 | 305.3 |
| 33 | asp | Eukaryotic aspartyl protease | 5.7e−211 | 714.3 |
| 34 | SRCR | Scavenger receptor cysteine-rich | 4.3e−187 | 634.9 |
| | | domain | | |
| 37 | F-box | F-box domain. | 0.089 | 19.3 |
| 39 | NADHdh | NADH dehydrogenases | 1.3e−39 | 145.0 |
| 42 | Ribosomal_L30 | Ribosomal protein L30p/L7e | 1.2e−10 | 40.0 |
| 43 | G_Adapt_CT | Gamma-adaptin, C-terminus | 1.7e−67 | 237.6 |
| 50 | KRAB | KRAB box | 7.4e−12 | 52.8 |
| 51 | SCAN | SCAN domain | 5.4e−67 | 236.0 |
| 55 | PH | PH domain | 1.1e−06 | 28.9 |
| 56 | SH3 | SH3 domain | 1.8e−14 | 61.5 |
| 57 | globin | Globin | 2.1e−26 | 96.5 |
| 60 | NHL | NHL repeat | 1.7e−46 | 167.9 |
| 61 | ATP-synt_A | ATP synthase A chain | 1.3e−10 | 48.7 |
| 62 | HSP90 | Hsp90 protein | 0 | 1548.4 |
| 65 | annexin | Annexin | 1.9e−77 | 270.7 |
| 66 | ferritin | Ferritins | 4.1e−114 | 386.1 |
| 67 | PUA | PUA domain | 1.7e−16 | 68.2 |
| 69 | DUF34 | Domain of unknown function DUF34 | 1.2e−33 | 125.2 |
| 73 | ig | Immunoglobulin domain | 0.0015 | 16.5 |
| 75 | Exonuclease | Exonuclease | 0.076 | −29.3 |
| 76 | globin | Globin | 5.9e−53 | 189.1 |
| 78 | globin | Globin | 4.6e−57 | 203.0 |
| 79 | K_tetra | K+ channel tetramerisation domain | 5.6e−22 | 86.4 |
| 81 | PH | PH domain | 2.2e−21 | 81.4 |
| 82 | Band_41 | FERM domain (Band 4.1 family) | 1.1e−22 | 73.0 |
| 85 | oxidored_q1 | NADH-Ubiquinone/plastoquinone | 3.6e−06 | 25.3 |
| | | (complex I) | | |
| 87 | ECH | Enoyl-CoA hydratase/isomerase family | 4.1e−52 | 186.6 |
| 88 | ECH | Enoyl-CoA hydratase/isomerase family | 4.1e−52 | 186.6 |
| 89 | ECH | Enoyl-CoA hydratase/isomerase family | 1.3e−20 | 81.9 |
| 91 | Ribosomal_L6 | Ribosomal protein L6 | 9e−99 | 341.6 |
| 95 | Ribosomal_S6e | Ribosomal protein S6e | 1.8e−90 | 314.0 |
| 96 | arf | ADP-ribosylation factor family | 5.4e−98 | 339.0 |
| 97 | FG-GAP | FG-GAP repeat | 1.4e−77 | 271.2 |
| 100 | tubulin | Tubulin/FtsZ family | 1.8e−49 | 177.8 |
| 101 | tubulin | Tubulin/FtsZ family | 1.8e−49 | 177.8 |
| 102 | carb_anhydrase | Eukaryotic-type carbonic anhydrase | 2.3e−48 | 174.1 |
| 104 | GrpE | GrpE | 5.9e−70 | 245.8 |
| 111 | FAD_binding | FAD binding domain | 7.2e−122 | 418.3 |
| 112 | rrm | RNA recognition motif. | 9.7e−12 | 52.4 |
| 113 | SET | SET domain | 3.3e−34 | 127.1 |
| 114 | SET | SET domain | 3.3e−34 | 127.1 |
| 115 | fn3 | Fibronectin type III domain | 2.6e−292 | 984.5 |
| 126 | oxidored_q2 | NADH-ubiquinone/plastoquinone | 1.8e−44 | 161.2 |
| | | oxidoreduct | | |
| 132 | Phosducin | Phosducin | 0.097 | 9.7 |
| 139 | IL8 | Small cytokines (intecrine/chemokine), | 3.6e−38 | 131.6 |
| | | inter | | |
| 141 | proteasome | Proteasome A-type and B-type | 6.1e−39 | 142.8 |
| 142 | RFX_DNA_binding | RFX DNA-binding domain | 4.1e−43 | 156.7 |
| 143 | RhoGEF | RhoGEF domain | 8.1e−64 | 225.4 |
| 146 | HLH | Helix-loop-helix DNA-binding domain | 1.4e−05 | 31.9 |
| 147 | BRCT | BRCA1 C Terminus (BRCT) domain | 1.2e−28 | 108.6 |
| 149 | lipocalin | Lipocalin/cytosolic fatty-acid binding | 2.5e−41 | 146.4 |
| | | pr | | |
| 150 | Armadillo_seg | Armadillo/beta-catenin-like repeats | 7.8e−10 | 46.1 |
| 153 | CSD | ‘Cold-shock’ DNA-binding domain | 1.1e−33 | 124.6 |
| 154 | CSD | ‘Cold-shock’ DNA-binding domain | 1.1e−33 | 124.6 |
| 156 | Glycos_transf_1 | Glycosyl transferases group 1 | 6.7e−39 | 142.7 |
| 157 | zf-C2H2 | Zinc finger, C2H2 type | 0.00041 | 27.1 |
| 162 | ig | Immunoglobulin domain | 1e−06 | 26.7 |
| 164 | ACBP | Acyl CoA binding protein | 1.1e−39 | 145.2 |
| 165 | DUF60 | Domain of unknown function DUF60 | 2.2e−36 | 134.3 |
| 168 | Gelsolin | Gelsolin repeat. | 9.3e−109 | 374.7 |
| 169 | LRR | Leucine Rich Repeat | 0.00025 | 27.8 |
| 170 | ribonuc_red | Ribonucleotide reductases | 1.5e−122 | 358.6 |
| 172 | GNS1_SUR4 | GNS1/SUR4 family | 2.7e−09 | −26.6 |

[0457] TABLE 5

| SEQ ID | | | | | |
|---|---|---|---|---|---|
| NO: of full- | SEQ ID NO: | SEQ ID NO: | SEQ ID NO: | Priority docket | |
| length | of full-length | of contig | of contig | number_corresponding | |
| nucleotide | peptide | nucleotide | peptide | SEQ ID NO: in priority | SEQ ID NO: in |
| sequence | sequence | sequence | sequence | application | USSN 09/515,126 |
| 1 | 173 | 345 | 517 | 788CIP2_3 | 788_9798 |
| 2 | 174 | 346 | 518 | 788CIP2_5 | 788_10429 |
| 3 | 175 | 347 | 519 | 788CIP2_6 | 788_10672 |
| 4 | 176 | 348 | 520 | 788CIP2_7 | 788_10828 |
| 5 | 177 | 349 | 521 | 788CIP2_8 | 788_10879 |
| 6 | 178 | 350 | 522 | 788CIP2_9 | 788_11026 |
| 7 | 179 | 351 | 523 | 788CIP2_10 | 788_11045 |
| 8 | 180 | 352 | 524 | 788CIP2_11 | 788_11381 |
| 9 | 181 | 353 | 525 | 788CIP2_12 | 788_11481 |
| 10 | 182 | 354 | 526 | 788CIP2_13 | 788_11927 |
| 11 | 183 | 355 | 527 | 788CIP2_14 | 788_12700 |
| 12 | 184 | 356 | 528 | 788CIP2_15 | 788_12706 |
| 13 | 185 | 357 | 529 | 788CIP2_16 | 788_12741 |
| 14 | 186 | 358 | 530 | 788CIP2_17 | 788_12744 |
| 15 | 187 | 359 | 531 | 788CIP2_18 | 788_13017 |
| 16 | 188 | 360 | 532 | 788CIP2_20 | 788_13633 |
| 17 | 189 | 361 | 533 | 788CIP2_21 | 788_13637 |
| 18 | 190 | 362 | 534 | 788CIP2_22 | 788_13645 |
| 19 | 191 | 363 | 535 | 788CIP2_23 | 788_13695 |
| 20 | 192 | 364 | 536 | 788CIP2_24 | 788_13756 |
| 21 | 193 | 365 | 537 | 788CIP2_25 | 788_13858 |
| 22 | 194 | 366 | 538 | 788CIP2_26 | 788_13886 |
| 23 | 195 | 367 | 539 | 788CIP2_27 | 788_14039 |
| 24 | 196 | 368 | 540 | 788CIP2B_2 | 788_31 |
| 25 | 197 | 369 | 541 | 788CIP2B_3 | 788_54 |
| 26 | 198 | 370 | 542 | 788CIP2B_4 | 788_58 |
| 27 | 199 | 371 | 543 | 788CIP2B_5 | 788_768 |
| 28 | 200 | 372 | 544 | 788CIP2B_6 | 788_1718 |
| 29 | 201 | 373 | 545 | 788CIP2B_7 | 788_1748 |
| 30 | 202 | 374 | 546 | 788CIP2B_8 | 788_1751 |
| 31 | 203 | 375 | 547 | 788CIP2B_9 | 788_1850 |
| 32 | 204 | 376 | 548 | 788CIP2B_10 | 788_1946 |
| 33 | 205 | 377 | 549 | 788CIP2B_11 | 788_1967 |
| 34 | 206 | 378 | 550 | 788CIP2B_12 | 788_1994 |
| 35 | 207 | 379 | 551 | 788CIP2B_13 | 788_2331 |
| 36 | 208 | 380 | 552 | 788CIP2B_14 | 788_2725 |
| 37 | 209 | 381 | 553 | 788CIP2B_15 | 788_2735 |
| 38 | 210 | 382 | 554 | 788CIP2B_16 | 788_2961 |
| 39 | 211 | 383 | 555 | 788CIP2B_18 | 788_3039 |
| 40 | 212 | 384 | 556 | 788CIP2B_19 | 788_3287 |
| 41 | 213 | 385 | 557 | 788CIP2B_20 | 788_4305 |
| 42 | 214 | 386 | 558 | 788CIP2B_21 | 788_4356 |
| 43 | 215 | 387 | 559 | 788CIP2B_22 | 788_4389 |
| 44 | 216 | 388 | 560 | 788CIP2B_24 | 788_4458 |
| 45 | 217 | 389 | 561 | 788CIP2B_25 | 788_4685 |
| 46 | 218 | 390 | 562 | 788CIP2B_26 | 788_4825 |
| 47 | 219 | 391 | 563 | 788CIP2B_27 | 788_4829 |
| 48 | 220 | 392 | 564 | 788CIP2B_28 | 788_4856 |
| 49 | 221 | 393 | 565 | 788CIP2B_29 | 788_4917 |
| 50 | 222 | 394 | 566 | 788CIP2B_30 | 788_4939 |
| 51 | 223 | 395 | 567 | 788CIP2B_31 | 788_4943 |
| 52 | 224 | 396 | 568 | 788CIP2B_32 | 788_5175 |
| 53 | 225 | 397 | 569 | 788CIP2B_33 | 788_5254 |
| 54 | 226 | 398 | 570 | 788CIP2B_34 | 788_5566 |
| 55 | 227 | 399 | 571 | 788CIP2B_35 | 788_5725 |
| 56 | 228 | 400 | 572 | 788CIP2B_36 | 788_5794 |
| 57 | 229 | 401 | 573 | 788CIP2B_37 | 788_5796 |
| 58 | 230 | 402 | 574 | 788CIP2B_38 | 788_5841 |
| 59 | 231 | 403 | 575 | 788CIP2B_39 | 788_5922 |
| 60 | 232 | 404 | 576 | 788CIP2B_40 | 788_5942 |
| 61 | 233 | 405 | 577 | 788CIP2B_41 | 788_5980 |
| 62 | 234 | 406 | 578 | 788CIP2B_42 | 788_6025 |
| 63 | 235 | 407 | 579 | 788CIP2B_43 | 788_6151 |
| 64 | 236 | 408 | 580 | 788CIP2B_44 | 788_6849 |
| 65 | 237 | 409 | 581 | 788CIP2B_45 | 788_7191 |
| 66 | 238 | 410 | 582 | 788CIP2B_46 | 788_7281 |
| 67 | 239 | 411 | 583 | 788CIP2B_47 | 788_8402 |
| 68 | 240 | 412 | 584 | 788CIP2B_48 | 788_9636 |
| 69 | 241 | 413 | 585 | 788CIP2B_49 | 788_9645 |
| 70 | 242 | 414 | 586 | 788CIP2B_50 | 788_9784 |
| 71 | 243 | 415 | 587 | 788CIP2B_51 | 788_10075 |
| 72 | 244 | 416 | 588 | 788CIP2B_52 | 788_10223 |
| 73 | 245 | 417 | 589 | 788CIP2B_53 | 788_10369 |
| 74 | 246 | 418 | 590 | 788CIP2B_54 | 788_10413 |
| 75 | 247 | 419 | 591 | 788CIP2B_55 | 788_10441 |
| 76 | 248 | 420 | 592 | 788CIP2B_56 | 788_10607 |
| 77 | 249 | 421 | 593 | 788CIP2B_57 | 788_10625 |
| 78 | 250 | 422 | 594 | 788CIP2B_58 | 788_10857 |
| 79 | 251 | 423 | 595 | 788CIP2B_59 | 788_10868 |
| 80 | 252 | 424 | 596 | 788CIP2B_60 | 788_10962 |
| 81 | 253 | 425 | 597 | 788CIP2B_61 | 788_11218 |
| 82 | 254 | 426 | 598 | 788CIP2B_62 | 788_11224 |
| 83 | 255 | 427 | 599 | 788CIP2B_63 | 788_11251 |
| 84 | 256 | 428 | 600 | 788CIP2B_64 | 788_11262 |
| 85 | 257 | 429 | 601 | 788CIP2B_65 | 788_11597 |
| 86 | 258 | 430 | 602 | 788CIP2B_66 | 788_11708 |
| 87 | 259 | 431 | 603 | 788CIP2B_67 | 788_11719 |
| 88 | 260 | 432 | 604 | 788CIP2B_68 | 788_11719 |
| 89 | 261 | 433 | 605 | 788CIP2B_69 | 788_11719 |
| 90 | 262 | 434 | 606 | 788CIP2B_70 | 788_11823 |
| 91 | 263 | 435 | 607 | 788CIP2B_71 | 788_11865 |
| 92 | 264 | 436 | 608 | 788CIP2B_72 | 788_11939 |
| 93 | 265 | 437 | 609 | 788CIP2B_73 | 788_11961 |
| 94 | 266 | 438 | 610 | 788CIP2B_74 | 788_12119 |
| 95 | 267 | 439 | 611 | 788CIP2B_75 | 788_12128 |
| 96 | 268 | 440 | 612 | 788CIP2B_76 | 788_12190 |
| 97 | 269 | 441 | 613 | 788CIP2B_77 | 788_12212 |
| 98 | 270 | 442 | 614 | 788CIP2B_78 | 788_12233 |
| 99 | 271 | 443 | 615 | 788CIP2B_79 | 788_12392 |
| 100 | 272 | 444 | 616 | 788CIP2B_80 | 788_12518 |
| 101 | 273 | 445 | 617 | 788CIP2B_81 | 788_12518 |
| 102 | 274 | 446 | 618 | 788CIP2B_82 | 788_12525 |
| 103 | 275 | 447 | 619 | 788CIP2B_83 | 788_12594 |
| 104 | 276 | 448 | 620 | 788CIP2B_84 | 788_12737 |
| 105 | 277 | 449 | 621 | 788CIP2B_85 | 788_12818 |
| 106 | 278 | 450 | 622 | 788CIP2B_86 | 788_12825 |
| 107 | 279 | 451 | 623 | 788CIP2B_87 | 788_12868 |
| 108 | 280 | 452 | 624 | 788CIP2B_88 | 788_13029 |
| 109 | 281 | 453 | 625 | 788CIP2B_89 | 788_13031 |
| 110 | 282 | 454 | 626 | 788CIP2B_90 | 788_13037 |
| 111 | 283 | 455 | 627 | 788CIP2B_91 | 788_13051 |
| 112 | 284 | 456 | 628 | 788CIP2B_92 | 788_13061 |
| 113 | 285 | 457 | 629 | 788CIP2B_93 | 788_13105 |
| 114 | 286 | 458 | 630 | 788CIP2B_94 | 788_13105 |
| 115 | 287 | 459 | 631 | 788CIP2B_95 | 788_13131 |
| 116 | 288 | 460 | 632 | 788CIP2B_96 | 788_13281 |
| 117 | 289 | 461 | 633 | 788CIP2B_97 | 788_13325 |
| 118 | 290 | 462 | 634 | 788CIP2B_98 | 788_13453 |
| 119 | 291 | 463 | 635 | 788CIP2B_99 | 788_13557 |
| 120 | 292 | 464 | 636 | 788CIP2B_100 | 788_13638 |
| 121 | 293 | 465 | 637 | 788CIP2B_101 | 788_13638 |
| 122 | 294 | 466 | 638 | 788CIP2B_102 | 788_13655 |
| 123 | 295 | 467 | 639 | 788CIP2B_103 | 788 _13656 |
| 124 | 296 | 468 | 640 | 788CIP2B_104 | 788_13668 |
| 125 | 297 | 469 | 641 | 788CIP2B_105 | 788_13681 |
| 126 | 298 | 470 | 642 | 788CIP2B_106 | 788_13725 |
| 127 | 299 | 471 | 643 | 788CIP2B_107 | 788_13796 |
| 128 | 300 | 472 | 644 | 788CIP2B_108 | 788_13802 |
| 129 | 301 | 473 | 645 | 788CIP2B_109 | 788_13814 |
| 130 | 302 | 474 | 646 | 788CIP2B_110 | 788_13816 |
| 131 | 303 | 475 | 647 | 788CIP2B_111 | 788_13836 |
| 132 | 304 | 476 | 648 | 788CIP2B_112 | 788_13852 |
| 133 | 305 | 477 | 649 | 788CIP2B_113 | 788_13855 |
| 134 | 306 | 478 | 650 | 788CIP2B_114 | 788_13990 |
| 135 | 307 | 479 | 651 | 788CIP2B_115 | 788_14056 |
| 136 | 308 | 480 | 652 | 788CIP2B_116 | 788_14066 |
| 137 | 309 | 481 | 653 | 788CIP2B_117 | 788_14070 |
| 138 | 310 | 482 | 654 | 788CIP2C_1 | 788_360 |
| 139 | 311 | 483 | 655 | 788CIP2C_2 | 788_1175 |
| 140 | 312 | 484 | 656 | 788CIP2C_3 | 788_3964 |
| 141 | 313 | 485 | 657 | 788CIP2C_4 | 788_5522 |
| 142 | 314 | 486 | 658 | 788CIP2C_5 | 788_5537 |
| 143 | 315 | 487 | 659 | 788CIP2C_6 | 788_5573 |
| 144 | 316 | 488 | 660 | 788CIP2C_7 | 788_5868 |
| 145 | 317 | 489 | 661 | 788CIP2C_8 | 788_5868 |
| 146 | 318 | 490 | 662 | 788CIP2C_9 | 788_6265 |
| 147 | 319 | 491 | 663 | 788CIP2C_10 | 788_7013 |
| 148 | 320 | 492 | 664 | 788CIP2C_11 | 788_7017 |
| 149 | 321 | 493 | 665 | 788CIP2C_12 | 788_7019 |
| 150 | 322 | 494 | 666 | 788CIP2C_13 | 788_8583 |
| 151 | 323 | 495 | 667 | 788CIP2C_14 | 788_8792 |
| 152 | 324 | 496 | 668 | 788CIP2C_15 | 788_8816 |
| 153 | 325 | 497 | 669 | 788CIP2C_16 | 788_8916 |
| 154 | 326 | 498 | 670 | 788CIP2C_17 | 788_8916 |
| 155 | 327 | 499 | 671 | 788CIP2C_18 | 788_8950 |
| 156 | 328 | 500 | 672 | 788CIP2C_19 | 788_9067 |
| 157 | 329 | 501 | 673 | 788CIP2C_20 | 788_9254 |
| 158 | 330 | 502 | 674 | 788CIP2C_21 | 788_9285 |
| 159 | 331 | 503 | 675 | 788CIP2C_22 | 788_10049 |
| 160 | 332 | 504 | 676 | 788CIP2C_23 | 788_10858 |
| 161 | 333 | 505 | 677 | 788CIP2C_24 | 788_11054 |
| 162 | 334 | 506 | 678 | 788CIP2C_25 | 788_11872 |
| 163 | 335 | 507 | 679 | 788CIP2C_26 | 788_12230 |
| 164 | 336 | 508 | 680 | 788CIP2C_27 | 788_12369 |
| 165 | 337 | 509 | 681 | 788CIP2C_28 | 788_12464 |
| 166 | 338 | 510 | 682 | 788CIP2C_29 | 788_12708 |
| 167 | 339 | 511 | 683 | 788CIP2C_30 | 788_13024 |
| 168 | 340 | 512 | 684 | 788CIP2C_31 | 788_13199 |
| 169 | 341 | 513 | 685 | 788CIP2C_32 | 788_13601 |
| 170 | 342 | 514 | 686 | 788CIP2C_33 | 788_13666 |
| 171 | 343 | 515 | 687 | 788CIP2C_34 | 788_13749 |
| 172 | 344 | 516 | 688 | 788CIP2C_35 | 788_14042 |

[0458] TABLE 6

| | | | | |
|---|---|---|---|---|
| | | Predicted | | Amino acid sequence (A = Alanine C = Cysteine, |
| | | beginning | Predicted end | D = Aspartic Acid, E = Glutamic Acid, |
| | | nucleotide | nucleotide | F = Phenylalanine, G = Glycine, H = Histidine, |
| | | location | location | I = Isoleucine, K = Lysine, L = Leucine, M = Methionine, |
| | | corresponding | corresponding | N = Asparagine, P = Proline, Q = Glutamine, |
| | | to first amino | to last amino | R = Arginine, S = Serine, T = Threonine, V = Valine, |
| SEQ | | acid residue of | acid residue of | W = Tryptophan, Y = Tyrosine, X = Unknown, * = Stop |
| ID | | peptide | peptide | codon, / = possible nucleotide deletion, \ = possible |
| NO: | Method | sequence | sequence | nucleotide insertion |

| | | | | |
|---|---|---|---|---|
| 517 | A | 40 | 359 | LKIPMQFLHSGFWFSFFVFFGF*KFGFGP |
| | | | | QGGRQGG\NKTKGEKLPPGKKKIPGPNP |
| | | | | QENREKKGPPKTLKKFGNLKKKGGKTR |
| | | | | GPRGEKNSDPKGTPGQNPGNKKK |
| 518 | A | 50 | 371 | VVVAPVVVGSGRA/PRHPAPAAMHSRRP |
| | | | | DGFDGLGYRGGARDEQGFGGAFPARSFI |
| | | | | TGSDLGHWVTTLTDI\PGRRN\LHWGVK |
| | | | | SPPYGVPTNCTPYEGPTEDPFDSGSG |
| 519 | A | 114 | 380 | DGFPLSFYNTPKSPTSEILFPLSEILFSGPF |
| | | | | GWLAAPSCFGFSCHFLKKGFLGPGTVAH |
| | | | | SCNPSTLGGRGGWI/T/RGQEIKTILANTV |
| | | | | KP |
| 520 | A | 13 | 411 | GPLRVDTWSNVESLACAQREEEEENER |
| | | | | KKLPGTASPEKKQE\LVDEPAVGESKEE |
| | | | | KIELKSITADGESPPASKINMDALQPNEN |
| | | | | EDKSPYPTPESTGEEDEEEPEMPVGPRPR |
| | | | | PLSELHLKEKTVPMPEASAC |
| 521 | A | 1 | 451 | KINTELQTEVAMLKSMVLWLGEQVQSL |
| | | | | QLQQQLRHHFNHIHICVTNSEYNQSEYP |
| | | | | WDLVKAHLQGAFTSNITFDTGEFQNTIID |
| | | | | STK*PHDL*ASLDCS*I*DGLSILASVLM |
| | | | | LAAPVLALQTPSWMLFMALPVSLSRLK |
| | | | | AYFLVSVLS |
| 522 | A | 354 | 549 | IFWVGKNALHEDE*NTERRTDDIPVWDH |
| | | | | EFLKVDQGTLFELILAANYLYIRGWLDV |
| | | | | TCKTGANMI |
| 523 | A | 448 | 489 | YARSAIGLLVFQSLMLVAAGDQFLFRP* |
| | | | | GE*RQPR**LKMTKHPPNRRGISFEVGAQ |
| | | | | LEARDRLKNWYPAHIEDIDYEEGKVLIH |
| | | | | FKRWNHRYDEWFCWDSPYLRPLEKIQL |
| | | | | RKEGLHEEDGSSVSNKSGKFCSMQGQPL |
| | | | | GCLCFNL |
| 524 | A | 35 | 402 | KLFLGFPILHGSSSPP*LKVPSLTHKVSAL |
| | | | | VSSNSF*VMYLVIFHMNMKVAWRRGSL |
| | | | | LHSFQLGFYKSQHFGRPRWADRLRLGV |
| | | | | RDQPGQHGETPSLLVQKKI |
| 525 | A | 203 | 3 | GPKPFSLGHKGKSCVKKNIFFFFFGGSHL |
| | | | | *MQLLRRLRWEDQLSSGGRGCSGP*LHH |
| | | | | CTVAWATEQD |
| 526 | A | 617 | 14 | VFTGNYNSKMRIWVGTQPNHISAHPHW |
| | | | | VMVISVSSRNALIDMPRNPCLTSCVCLSI |
| | | | | QSSRRLRLTIRIFMPDSWLKSCLTSYVCL |
| | | | | SIQSSRCLRLTIRIFMPDSWLKSCLTSYVC |
| | | | | LSIQSSRRLQLTIRIFMPDSWLKSCLTSYV |
| | | | | CLSIQSSRCLQLTIRIFMPDSWLKSCLTSY |
| | | | | VCLLIQSSRCLKLTVRIFMPLVPRLA |
| 527 | A | 149 | 759 | SRMTKKRKRQHDFQKVKLKVGKKKPK |
| | | | | LQNATPTNFKTKTIHLPEQLKEDGTLPTN |
| | | | | NRKLNIKDLLSQMHHYNAGVKQRALLG |
| | | | | LKDLLSQYPFIIDAHLLNILSEVTAVFTD |
| | | | | KDANVRLAAVQLLQFLAPKIRAEQISPFF |
| | | | | PLVSAHLSSAMTHITEGIQEDSLKVLDIL |
| | | | | LEQYPALITGRSSILLKNFVELISHQQLSK |
| | | | | GLDK |
| 528 | A | 117 | 369 | WLPGEMAVEPPADRLQEPLTFRDGAED |
| | | | | FTQEEWGQLDPTQRILYRDVMLETFDHL |
| | | | | LSIGPELTKPEDISQLEQGTDLWVALETLT |
| 529 | A | 836 | 433 | AVGGSSRSHGYRRPAGTRPVSHAQDPSA |
| | | | | PPPAS/RLPCIEARGGQ*SLPSLILQPGGA |
| | | | | GWGILLPNSVLPPAPCTPQSHVSLPSAGP |
| | | | | CAPLGGRRQAPLGPRAAEPCRVRGCGA |
| | | | | AALSCALPALGRGTFGWKTGI |
| 530 | A | 1282 | 210 | VRCTLSPACQTPPQGPHRSSGPVLSSPCP |
| | | | | APVGEWLPPNGP*SDDELPLSQQCKCRT |
| | | | | KSLAPPSSA*GS*HRT*LPGTGH*CGLARI |
| | | | | ESSAGVLEEASAAK*GSGEAPGSKQHSS |
| | | | | SPAATSAPSAGSWHPGTAAAHPPG/SSAS |
| | | | | FHTFAAFTVSLSASELGS**QSRVKHFFL |
| | | | | SCSSTSCCSRALIHTKSSESGMSSRRSAFS |
| | | | | SPSSGGISLSWLGPKSRISSVTSSRCSRVS |
| | | | | *NFLSSEVTFVS\VSSHSSPQATLE*LCVK |
| | | | | SQTSTMLSYAVELPSMPEPAPLLG*GLSH |
| | | | | SHPHAVRDSGEAC*SMGSVTGPLYSGYK |
| | | | | EEVVCCTLVEVFPSLLQVSRNPRMPFDF |
| | | | | LGILICTPWGS |
| 531 | A | 12 | 245 | CAKNECQGGQVESGSF*AIYL*TVI\YLC |
| | | | | VYLSVCLSIYLSVYLSIYLSIYLSIYLSIYP |
| | | | | SIHPSIQLASI*SIFLWG |
| 532 | A | 1 | 849 | RKMAGSPELVVLDPPWDKELAAGTESQ |
| | | | | ALVSATPREDFRVRCTSKRAVTEMLQLC |
| | | | | GRFVQKLGDALPEEIREPALRDAQWTFE |
| | | | | SAVQENISINGQAWQEASDNCFMDSDIK |
| | | | | VLEDQFDEIIVDIATKRKQYPRKILECVIK |
| | | | | TIKAKQEILKQYHPVVHPLDLKYDPDPA |
| | | | | PHMENLKCRGETVAKEISEAMKSLPALI |
| | | | | EQGEGFSQVLRMQPVIHLQRIHQEVFSS |
| | | | | CHPDAPENFITQIETTPTETASRKTS |
| | | | | DVVLKRKQTKDCPQRKWYPLRPKKINL |
| | | | | DT |
| 533 | A | 120 | 804 | DCKNRNCSKGDSVPMHQQKRQPELVEG |
| | | | | NLPVFVFPTELIFYADDQSTHKQVLTLY |
| | | | | NPYEFALKFKVLCTTPNKYVVVDAAGA |
| | | | | VKPQCCVDIVIRHRDVRSCHYGVIDKFR |
| | | | | LQVSEQSQRKALGRKEVVATLLPSAKEQ |
| | | | | QKEEEEKRLKEHLTESLFFEQSFQPENRA |
| | | | | VSSGPSLLTVFLGVVCIAALMLPTLGDV |
| | | | | ESLVPLYLHLSVNQKLVAAYILGLITMAI |
| | | | | LRT |
| 534 | A | 479 | 1906 | SMISFCPDCGKSIQAAFKFCPYCGNSLPV |
| | | | | EEHVGSQTFVNPHVSSFQGSKRGLNSSF |
| | | | | ETSPKKVKWSSTVTSPRLSLFSDGDSSES |
| | | | | EDTLSSSERSKGSGSRPPTPKSSPQKTRK |
| | | | | SPQVTRGSPQKTSCSPQKTRQSPQTLKRS |
| | | | | RVTTSLEALPTGTVLTDKSGRQWKLKSF |
| | | | | QTRDNQGILYEAAPTSTLTCDSGPQKQK |
| | | | | FSLKLDAKDGRLFNEQNFFQRAAKPLQV |
| | | | | NKWKKLYSTPLLAIPTCMGFGVHQDKY |
| | | | | RFLVLPSLGRSLQSALDVSPKHVLSERSV |
| | | | | LQVACRLLDALEFLHENEYVHGNVTAE |
| | | | | NIFVDPEDQSQVTLAGYGFAFRYCPSGK |
| | | | | HVAYVEGSRSPHEGDLEFISMDLHKGCG |
| | | | | PSRRSDLQSLGYCMLKWLYGFLPWTNC |
| | | | | LPNTEDIMKQKQKFVDKPGPFVGPCGH |
| | | | | WIRPSETLQKYLKVVMALTYEEKPPYA |
| | | | | MLRNNLEALLQDLRVSPYDPIGLPMVP |
| 535 | A | 3828 | 2909 | AECEEVRRKSELFNPVSLDCKLRQKAIA |
| | | | | EVDVGTDKAQNSDPILDTSSLVPGCSSV |
| | | | | DNIKSSQTSQNQGLGRPTLEGDEETSEVE |
| | | | | YTVNKGPASSNRDRVPPSSEASEHHPRH |
| | | | | RVSSQAEDTSSSFDNLFIDRLQRITIADQ |
| | | | | GEQQSEENASTKNLTGLSSGTEKKPHYM |
| | | | | EVLEMRAKNPVPQLRKFKTNVLPFRQN |
| | | | | DSSSHCQKSGSPISSEERRRRDKQHLDDI |
| | | | | TAARLLPLHHMPTQLLSIEESLALQKQQ |
| | | | | KQNYEEMQAKLAAQKLAERLNIKMRSY |
| | | | | NPEGESSGRYREVRDEDDDWSSDEF |
| 536 | A | 45 | 257 | TLEFESHIIFMSHRIFFFCYLKAKIKILGW |
| | | | | ARWLVPVIPALWEAEVGRSFEARSSRTA |
| | | | | WATYGGSLFYKK |
| 537 | A | 1071 | 472 | KMACNIPNQRQRTLSTTGEALYEILGLH |
| | | | | KGASNEEIKKTYRLKLALKHHPDKNPDDP |
| | | | | AATEKFKEITDAHAILTDISKRSIYDKYG |
| | | | | SLGLYVAEQFGDENVNTYFMLSSWWA |
| | | | | KALFVIVGLLTGCYFCCCLCCCCNCCCG |
| | | | | HCRPESSVPEEDFYVSPEDLEEQIKSDME |
| | | | | KDVDFPVFLQPTNANEKTQLIKEGSRSY |
| | | | | CTDS |
| 538 | A | 1 | 1528 | RLAAAGADPAGSRGGRGSREAPTEAAR |
| | | | | CRASPPPRAGAMRGSPGDAERRQRWGR |
| | | | | LFEELDSNKDGRVDVHELRQGLARLGG |
| | | | | GNPDPGAQQGISSEGDADPDGGLDLEEF |
| | | | | SRYLQEREQRLLLMFHSLDRNQDGHIDV |
| | | | | SEIQQSFRALGISISLEQAEKILHSMDRDG |
| | | | | TMTIDWQEWRDHFLLHSLENVEDVLYF |
| | | | | WKHSTVLDIGECLTVPDEFSKQEKLTGM |
| | | | | WWKQLVAGAVAGAVSRTGTAPLDRLK |
| | | | | VFMQVHASKTNRLNILGGLRSMVLEGGI |
| | | | | RSLWRGNGINVLKIAPESAIIKFMAYEQIK |
| | | | | RAILGQQETLHVQERFVAGSLAGATAQT |
| | | | | IIYPMEVLKTRLTLRRTGQYKGLLDCAR |
| | | | | RILEREGPRAFYRGYLPNVLGIIPYAGIDL |
| | | | | AVYETLKNWWLQQYSHDSADPGILVLL |
| | | | | ACGTISSTCGQIASYPLALVRTRMQAQA |
| | | | | SIEGGPQLSMLGLLRHILSQEGMRGLYR |
| | | | | GIAPNFMKVIPAVSISYVVYENMKQALG |
| | | | | VTSRSFC |
| 539 | A | 474 | 1098 | RRRCFQGFLKKKKIIQPKGEGTGRGRGV |
| | | | | VPFIHNIVNIHGLYYMCFSLVFACLSVRL |
| | | | | SVWGLDLRSRAPLLPQPPPPCPTLGTELE |
| | | | | QVWPPNHRWEPAGSAWATASTLAPESC |
| | | | | VCKCVCVYACLSMCMYVHGEPVCKYV |
| | | | | QRETVTVTEAGGRWGCWRRGLPGADSS |
| | | | | QVDPPQVSGRCDRVALRAELLGTQGPQ |
| | | | | PALLAVHVPTLDGR |
| 540 | A | 1178 | 1 | VSFLLWTSGNKEDGRNGPAVPSRHTGG |
| | | | | SRTWRMPK*QEGENPCPLPKRNLGNA*T |
| | | | | FNS*KRTGPG/SPDSKGPDLGPI/SVPHILS |
| | | | | GSPQPSS\PTLPQLHDLLAIPVMQGREAG |
| | | | | GLRGHRALPLA*EEAGRALQLPLSQPPP |
| | | | | CRPAAPFFNQ/GPQGCCPWRGSGHSPGP |
| | | | | QLGG*EPGAYSGWQQTSRMSGVAKPGS |
| | | | | GVRPATGSPTRVPPGACSQSLPGTAPSPR |
| | | | | PPGPPALLRPAGVGALQGHQSRWQRQT |
| | | | | PRAREPRPVPLCSLPAPPGSVGPGPRDSQ |
| | | | | RRIAGCP*GQTSIFGQCHWGSVGSLGPPR |
| | | | | CAGSPCGPLGSR*VHSGLHSSRSASWLP |
| | | | | REQQGS/PGGGQGPLVWPHSSALRPPGN |
| | | | | PGNLPPPIAPKPKRAIPARDPAPPPGLQH |
| | | | | E |
| 541 | A | 1 | 438 | MLAIFKYLINNRLITT*Q/WTEKLTS*QMI |
| | | | | TIHNTKGLT*SLILLSLIIFIATTNLLGLLP |
| | | | | YSFTPTTQLSINLSMAIPL*TVAEFIGFRS |
| | | | | KIKNALSHFLPQGTPTPLIPILVIIETISLLI |
| | | | | QPILLDVLLTANITAGHLLIHLN |
| 542 | A | 13 | 577 | LNINKKYNYIKR*DYYKIII\NKKMNII*IIN |
| | | | | K*YNKE*YK*NMKKIIK\Y*IYYSQVSTPT |
| | | | | IVKVSRNLGKVGSKCCKHPEAKRMPCA |
| | | | | EDYLYVVLNQL*VLHEKTPVNDRVTKC |
| | | | | *KESLVNRRPCFSTLEVDKTYVTKKFNA |
| | | | | ETFTFHADICTLSEKERQIKKQTALDELV |
| | | | | KHKPKATKEQLKAVMDD |
| 543 | A | 297 | 0 | SSSSSSPSTPGPPSPFLRQPPFGLNPFLPAG |
| | | | | D*GTQRGGSGRGGRGRGR/DGSTNEGRG |
| | | | | ERRGQG |
| 544 | A | 395 | 1 | AKRKSVPEEIWKSRGQFKNQQLNKENN |
| | | | | LGQEIATCTKIPSRKRDIEFNEFVKNFTV |
| | | | | RSILVAEQIDPMEENCHKYGTC*KMLKQ |
| | | | | NSDLIIQ\ESMMEKKKPCKYSECGRTFRG |
| | | | | HITLVQHQITHCGERPCI |
| 545 | A | 291 | 209 | NNKNKIASKRKKNSPEPGGLTTEL/YQTS |
| | | | | KEELEPILLNLFQKIEKEEILSNSFRETSIA |
| | | | | LIPKPGKDITKEVNHRPISLMNRDAKVL |
| | | | | NKMLSN*IQ |
| 546 | A | 419 | 3 | GKPPFYFGGPGFFPPPV/YFKPPPPKNFFG |
| | | | | PPKKKKFPPPPGVYFFFFLRPPPPLFFFFF |
| | | | | FFFFFFFF*EGGGEKPSPP/IKKGFFKPKKF |
| | | | | FSPPPGGKKKPPFLKKKKKKKDVPQSSN |
| | | | | LESSLSFPIHKTGTIIPASLNV |
| 547 | A | 28 | 414 | HTLLLQCLSAVAFSQPCPHPSRL/CNPCC |
| | | | | ASGPPCSS*ACCPRFCQSCPVC*PQNLLS |
| | | | | SCPSPDLALTSPSAGRPRCWWNCCQLTP |
| | | | | CLSLQTQEWTGAHLQLRRWGTQAGPEE |
| | | | | PVHQRTVGSTSHSCSYA |
| 548 | A | 419 | 2 | RWSARSRITGEEGSESAVQER*LTYHTH |
| | | | | GGIANRDRTHCPVSLVN\VSSMSAGDVIT |
| | | | | AGKMQGKVVLAEPTAALCHGN\GLHYY |
| | | | | RQDWSHAAAYVTVPPVRVDTNTSTYLM |
| | | | | SLLANDTLNIVASDRRPFTTKQKAMGNV |
| 549 | A | 201 | 550 | GCLVSLGVSHAWQRVGTWEIFVG*MNA |
| | | | | G*MSA*TRGTEISRIGQWMGGEGMSGLT |
| | | | | SWFLLGEMNP*GLRELNLLLTLSITMNG |
| | | | | ETIACAEGCQAICDTGTSLLT/GPTSPIAQ |
| | | | | HQSDI |
| 550 | A | 1 | 526 | LLDNCQMTVLGAPTCIHGNTVSVICTGS |
| | | | | LTQPLFPCLANVSDPYLSAVPEGSALICL |
| | | | | EDKRLRLVDGDSRCAGRVEIYHDGFWG |
| | | | | TICDDGWDLSDAHVVCQKLSCGVAFNA |
| | | | | TVSAHFG/VGAGPIW/LDDL/NCTGMESH |
| | | | | LRQ/CPF |
| 551 | A | 369 | 130 | FFFFFFXXXGVXGLNFFFFXFFXXFFFFFF |
| | | | | FXFXXXXXFFFFFXGXXXXFXXFXXXX |
| | | | | XFFFFFFFFFFFFFFFFFFFXCY |
| 552 | A | 255 | 338 | EVMHFCLFVF*DRVLLCHPGWSAVAQS |
| | | | | Q |
| 553 | A | 120 | 383 | TAPKKKKGGAPLGGPPRGPILPRIPENRR |
| | | | | PP**GALLKPSPGPRFNTAWPGKPAPRES |
| | | | | LKRAPSLGGGPKRPNPPPEVKASGADKK |
| | | | | L |
| 554 | A | 3 | 365 | YHIVQPSP*PLAGALSALLMTSGLAMRS |
| | | | | HFHSITLLILGLLSSTLTIYQ*WRDVTRES |
| | | | | TYQGHHTPPVRKGLRYGIILFITSEVIFFA |
| | | | | GLF*AFYHSSLAPTPQLGGHWPPTGITPL |
| | | | | NTLE |
| 555 | A | 1 | 125 | LMNSNSIPPIPLRPTHTPPMKKL*IRTAYP |
| | | | | RFRYDQLIHLL*KNFLPLTLALLI*HVKK |
| | | | | KKKK |
| 556 | A | 372 | 86 | PACGGFSPPPPPKFFFFPPPLFFFGGGGPP |
| | | | | FPPPPKGFFFPNPPRGFFFPPP*KKKFFFPP |
| | | | | PPFFCPPPVFFFCPPPLFFFFFFFFFFFFFFF |
| | | | | FF |
| 557 | A | 2 | 376 | FVAAEVRDGGGGAGTRPPSGRMKRRNA |
| | | | | DCSKLRRPLKRNRITEGIYGSTFLYLKFL |
| | | | | VVWALVLLADFVLEFRFEYLWPFWLFIR |
| | | | | SVYDSFRYQGLVCLVIHVFHVWGPFSCL |
| | | | | E*MLLAILR*LC |
| 558 | A | 39 | 459 | VLNHSYMIPGRRNVTRCISRQLEVQPHA |
| | | | | LELPDKCSLAFVVRIKRIDGGSLLVQRTI |
| | | | | ARLCLKKIFSGVFLKMLRIVEPYVT*GFP |
| | | | | NLKSVWEFILKHGQAKVKNKTIGQTQW |
| | | | | LTPVIPALWEAKDGWIMRSGDRDHPGQ |
| 559 | A | 2 | 456 | EVRSHVKVLGEMLVMYRRPGQAPPDQE |
| | | | | ALQVVYERCEKLRPTLFRLASDTTDDDD |
| | | | | ALSEILQANDLLTQGVLLYKQVMEGRV |
| | | | | TFGNRVTSSLGDIPVSRVFQNPAGCMKT |
| | | | | CPLIDLEVDNGPAQMGTVVPSLLHQDLA |
| | | | | ALGNSDAPVTGMV |
| 560 | A | 54 | 1063 | RRRADGCIYGVSRRARVVAYRRDEMWS |
| | | | | EGRYEYERIPRERAPPRSHPSDESGYRW |
| | | | | TRDDHSASRQPEYRDMRDGFRRKSFYSS |
| | | | | HYARERSPYKRDNTFFRESPVGRKDSPH |
| | | | | SRSGSSVSSRSYSPERSKSYSFHQSQHRK |
| | | | | SVRPGASYKRQNEGNPERDKERPVQSLK |
| | | | | TSRDTSPSSGSAVSSSKVLDKPSRLTEKE |
| | | | | LAEAASKWAAEKLEKSDESNLPEISEYE |
| | | | | AGSTAPLFTDQPEEPESNTTHGIELFEDS |
| | | | | QLTTRSKAIASKTKEIEQVYRQDCETFG |
| | | | | MVVKMLIEKDPSLEKSIQFALRQNLHEI |
| | | | | GERCVEELKHFIAEYDTSTQDFGEPF |
| 561 | A | 1887 | 442 | LLIREVFIQVLIKLRVCFVQCFSEADRDI |
| | | | | MTLANHWNCPVLSSDSDFCIFDLKTGFC |
| | | | | PLNSFQWRNMNTIKGTQNYIPAKCFSLD |
| | | | | AFCHHFSNMNKALLPLFAGLCGNDHVN |
| | | | | LPIMETFLSKARLPLGATSSKGRRHHRIL |
| | | | | GLLNWLSHFANPTEALDNVLKYLPKKD |
| | | | | RENVKELLCCSMEEYQQSQVKLQDFFQ |
| | | | | CGTYVCPDALNLGLPEWVLVALAKGQL |
| | | | | SPFISDALVLRRTILPTQVENMQQPNAHR |
| | | | | ISQPIRQIIYGLLLNASPHLDKTSWNALPP |
| | | | | QPLAFSEVERINKNIRTSIIDAVELAKDHS |
| | | | | DLSRLTELSLRRRQMLLLETLKVKQTILE |
| | | | | PIPTSLKLPIAVSCYWLQHTETKAKLHHL |
| | | | | QSLLLTMLVGPLIAIINSPGKEELQEDGA |
| | | | | KMLYAEFQRVKAQTRLGTRLDLDTAHI |
| | | | | FCQWQSCLQMGDVSQPAAVHSSPRARP |
| | | | | NSTVQWKPGARTMPATASIDLCRKSPEH |
| | | | | MS |
| 562 | A | 180 | 2 | TRHFYLKKNNFPPTQKSCLPLFSLSSLCV |
| | | | | CVCVCVCVCVCVCVYSSAYKKTRRMHR |
| | | | | WIR |
| 563 | A | 3 | 301 | GLVNMALYVSPIVSGEVIRSRGGSTSEFT |
| | | | | PGYVKPKHEVNPQMTLRRLPDEDPQNL |
| | | | | ADPAYRRRRIIMQNMRDEELAIAQVEEM |
| | | | | QAVSAVLKGKYTMTG |
| 564 | A | 270 | 31 | SFVVEELSWALQMLGRIPGLFAQIQNLG |
| | | | | KEKIFWKEFSILDANKNTDVSWKEIKIAT |
| | | | | LTGVWKKLILTFETVSYKSQNQH |
| 565 | A | 341 | 3 | YDVIVGGELFSDYSDRPRKFVALNPKLK |
| | | | | STGAGRYQFLSRWWDAYRKQLGLKDFS |
| | | | | PKSQAAVALQQIKERGALPMIDRGDIRQ |
| | | | | AIDRCSNMWASLPGAGYGQFEHKADSLI |
| | | | | A |
| 566 | A | 2 | 265 | QEEWSLLSEAQRCLYHDVMLENLTLISS |
| | | | | LGCWYGAKDETPSKQTLSIQQESPLRTH |
| | | | | WTGGNDVTLKLRLEYTGMVIPHCGLKL |
| | | | | LGLK |
| 567 | A | 376 | 206 | TPGWTQLDSSQVNLYRDEKQENHSSLV |
| | | | | SLGKTETLICLKISWHSLRIRTYWAVRSC |
| 568 | A | 212 | 428 | TQQQAARSSEAHSWQSSSTQSLLEKFFL |
| | | | | WRYSRGLRISLWFETESHCVPQVGVRW |
| | | | | CDLGSLKPLPPGFRRFS |
| 569 | A | 3 | 764 | RDKHINNLKKKGQKESEQNREKQQRIET |
| | | | | LERYLADLPTLEDHQKQSQQLKDSELKS |
| | | | | TELQEKVTELESLLEETQAICREKEIQLES |
| | | | | LRQRETEFSSAGHSLQDKQSVEETSGEG |
| | | | | PEVEMESWQKRYDSLQKIVEKQQQKMD |
| | | | | QLRSQVQSLEQEVAQEEGTSQALREEAQ |
| | | | | RRDSALQQLRTAVKELSVQNQDLIEKNL |
| | | | | TLQEHLRQAQPGSPPSPDTAQLALELHQ |
| | | | | ELASCLQDLQAVCSIVTQRAQGHDPNLS |
| | | | | L |
| 570 | A | 110 | 498 | KVFCQMNSLLDARSLSLTSMLFVCEVCV |
| | | | | KMCDPAKGAAGQRTIAALLPCLLDKGM |
| | | | | MSTVTEVRALSINTLVKISKSAGAMLKP |
| | | | | HAPKLIPALLESLSVLEPQVLNYLSLRAT |
| | | | | EQEKAAMDSARLSAAKS |
| 571 | A | 268 | 464 | ALTSPTLPQPLPGATVIEPLDDISAVTDIL |
| | | | | THREGARLETPPPWLAMFTDQPALPNPC |
| | | | | SPASVGP |
| 572 | A | 198 | 878 | GPRQKRKPKSSSSGTKGKGNLEPYLNFL |
| | | | | PLSQVNNKFGLRCKNCKTNIHEHCQSYV |
| | | | | EMQRCFGFIPPGFHRAYSSPLYSNQQYA |
| | | | | CVKDLSAANRNDPVFETLRTGVIMANK |
| | | | | ERKKGQADKKNPVAAMMEEEPESARPE |
| | | | | EGKPQDGNPEGDKKAEKKTPDDKHKQP |
| | | | | GFQQSHYFVALYRFKALEKDDLDFPPGE |
| | | | | KITVIDDSNEEWGRGKIGEKVGFFPSNFII |
| | | | | WGPA |
| 573 | A | 120 | 1 | FRPADKTNVKAAWGKVGAHAGEYGAE |
| | | | | ALERMFLSFPTTCI |
| 574 | A | 384 | 1 | RTDSSTTNRESVNSEDGDAKEPPYRGPF |
| | | | | CGRDRVHTDFTPSPYDTDSLKLKKGDII |
| | | | | DIISKPPMGTWMGLLNNKVGTFYYIYVD |
| | | | | VLSEDEEKPKRPTRRRRKGRPPQPKSVE |
| | | | | DLLDRINIKEHMPTCI |
| 575 | A | 460 | 3 | RVVQTVDPSKAQAKPHTLWVAFAKLYE |
| | | | | DNGQLDDARVILEKATKVNFKQVDDLA |
| | | | | SVWCQCGELELRHENYDEALRLLRKAT |
| | | | | ALPARRAEYFDGSEPVQNRVYKSLKVW |
| | | | | SMLADLEESLGTFQSTKAVYDRILDLRIA |
| | | | | TPHVFGRSEDQASTR |
| 576 | A | 396 | 2 | CRECTEGEHAELPTVPLKDVVEQHKASL |
| | | | | QVQLDAVNKRLPEIDSALQFISEIIHQLT |
| | | | | NQKASIVDDIHSTFDELQKTLNVRKSVL |
| | | | | LMELEVNYGLKHKVLQSQLDTLLQGQE |
| | | | | SIKSCSNFTAQTLNHGTKA |
| 577 | A | 1 | 45 | LLYTYVLLASGVWVA*AYHRLIENNRN |
| | | | | QIIQALLITILLGLYFTLLQASE\HLQSPFTI |
| | | | | SDGIYGSTFFVATGFHRLHVIIGSTLLTIC |
| | | | | FIPQLIFDFTSKHHFGIQAAV*YWHLVDG |
| | | | | V*LFMHGSI*WVA |
| 578 | A | 2091 | 320 | ISHSLSTQDPNGESIIYNSSFSAVDSFAVS |
| | | | | SPASDYLELDTIKNLVKKYSQFINFPIYV |
| | | | | WSSKTETVEEPMEEEEAAKEEKEESDDE |
| | | | | AAVEEEEEEKKPKTKKVEKTVWDWEL |
| | | | | MNDIKPIWQRPSKEVEEDEYKAFYKSFS |
| | | | | KESDDPMAYIHFTAEGEVTFKSILFVPTS |
| | | | | APRGLFDEYGSKKSDYIKLYVRRVFITD |
| | | | | DFHIDMMPKYLNFVKGVVDSDDLPLNVS |
| | | | | RETLQQHKLLKVIRKKLVRKTLDMIKKI |
| | | | | ADDKYNDTFWKEFGTNIKLGVIEDHSNR |
| | | | | TRLAKLLRFQSSHHPTDITSLDQYVERM |
| | | | | KEKQDKIYFMAGSSRKEAESSPFVERLL |
| | | | | KKGYEVIYLTEPVDEYCIQALPEFDGKR |
| | | | | FQNVAKEGVKFDESEKTKESREAVEKEF |
| | | | | EPLLNWMKDKALKDKIEKAVVSQRLTE |
| | | | | SPWLLWVGQPSTDWSGNMRDFMKAQA |
| | | | | YQPGK\DILPN\YYASQK\KTFEIN\PRPPL\ |
| | | | | IRDMLRRIK\EDE\DDKTVLDLA\VVLV*N |
| | | | | RQRLGSGYLFTQTLKAYGDW/RLERML |
| | | | | RLSFEHLTPDAKGGRRAPKEEP*KRQQK |
| | | | | DTSRKTQSRDEE/MQEMGWWETDEEEE |
| | | | | TSQRNPTA |
| 579 | A | 25 | 378 | IASGRPFFFFFFFFFFFFFFFFFFFFFFFFFF |
| | | | | FFFFFFFFFFFFFFFFFFFFFFFFFFFFFFFFF |
| | | | | FFFFFF*FYILKIFFFFFILELCYLSNYGVG |
| | | | | VTY/IRMSYYK*MLESYFFFTINIFFIGNN |
| | | | | YLISLIYNIYAVKRQL |
| 580 | A | 1 | 163 | GSTTPAMEFASLFKKILLIDCRD/RGLAL |
| | | | | LPRLVLSSWPQVIFLPWPPKFLGLRT |
| 581 | A | 1 | 272 | ESSCDWLNAYLTLVRCAQD*ADYFAER |
| | | | | LYKSMKGAGTDEETLIRIIVTRAEVDLH |
| | | | | GIKAKFQEKYQKSLSDMVRSDTFGDFRK |
| | | | | LLVALLH |
| 582 | A | 401 | 1 | LYIFSPSRLIFFRGFSFFFFPPKKIFFLKIFP |
| | | | | NDFFFPSHFFKIPSLGFFFYTFFIRKIFFFFP |
| | | | | IIYFSPPGFFF*SPPFFFFFFFFFFFFFFFFFF |
| | | | | FFFFFFFFFFFFFFFFFFFFFFFFFFFFFFFG |
| | | | | WYKQRPSQARVWTASLDFTL |
| 583 | A | 764 | 139 | GDLPDPCKFNFFPIPGPSLSSPPSPWIMFK |
| | | | | KFDEKENVSNCIQLKTSVIKGIKNQLIEQ |
| | | | | FPGIEPWLNQIMPKKDPVKIVRCHEHIEI |
| | | | | LTVNGELLFFRQREGPFYPTLRLLHKYPF |
| | | | | ILPHQQVDKGAIKFVLSGANIMCPGLTSP |
| | | | | GAKLYPAAVDTIVAIMAEGKQHALCVG |
| | | | | VMKMSAEDIEKVNKGIGIENIHYLNDGL |
| | | | | WHMKTYK |
| 584 | A | 1 | 343 | FFFFEDKVSLCHPRWECSDDITAH\CSLN |
| | | | | LGFK*SSHL\SLPK*LCLLGTQHYAPANF |
| | | | | LYFVFFVETGFRHVGQAGLEHLGSTDPP |
| | | | | ASA/FPKCWDYRCEPPCSTRFYYLS*LNF |
| | | | | G |
| 585 | A | 34 | 475 | IPPTMGNLALGGKNSSRGFVDSLICNSSR |
| | | | | AFMDWRALLSSLNDFASLSFAESWDNV |
| | | | | GLLVEPSPPHTVNTLFLTNDLTDEVMDE |
| | | | | VLLKKAHLILSYHPSIFRPMKRITWNTW |
| | | | | KELLVIRALENRVGIYSPYTT*EA\APQG |
| | | | | VNNWVA |
| 586 | A | 17 | 1040 | DGVSLLLYRLEYNGVISPHCNPGSSDSPA |
| | | | | SASRVAGITGMRHHAQLIFVFLVETGFH |
| | | | | HVGQAGLELLTSGDPPASASQSAGITGM |
| | | | | SHHAWPDVNYLKNFQVILMGQG\WNPC |
| | | | | SGPIRAPGCHKRMHALTPVGLGGFGNVL |
| | | | | LLF*DG/CLSVAHPGAQWHDHSSLQPRP |
| | | | | PGLR\YPPASAS*VSASGFHDDLGPRHTT |
| | | | | LVLFRGQSCTRSPSATAPPRSTDMQS*A |
| | | | | ALFPRGSCVGFLGPSVD/YRTPAEDLLG |
| | | | | MPHCLCFPSSLNTQSGLAMMPLCLLASP |
| | | | | PLEQPSWHATLLAAGHCAFCLYRSAVM |
| | | | | LPK*QQQQQQQRLGTWLMPVFPAVRDQ |
| | | | | PGQHGETLSL |
| 587 | A | 236 | 3 | VDHLRSEV*DQPGQHIVKPRLY*KIQKL |
| | | | | AGHGGACL*SPLLGKLRQENRLNPG\AR |
| | | | | SCSEPRSHYCTPAWGTE*NSVS |
| 588 | A | 93 | 413 | GYCFSRRSGSMALWRAYQRALAAHPW |
| | | | | KVQVLTADFWGGRQHCWPHASSYTCRP |
| | | | | RPPGLKD/IASCSSLQEATSCPSAFCA*NS |
| | | | | KATKQLVERRGLQEHQRGRTLTMVS |
| 589 | A | 518 | 2 | VGSQGLVPKKNRPAGKDLGAPSGGPPR |
| | | | | KCIP/WQGLLLTAS\LLAL*EAPTTAWLFI |
| | | | | ASAPYEVAEGENVHLSVVYLRENLYSY |
| | | | | GWYKGKTVEPNQLIAAYVIDTHVRTPGP |
| | | | | AYSGRETISPSGDLHFQNVTLEDTGYYN |
| | | | | LQVTYRNSQIEQASHHLRVYESVAQPSI |
| | | | | QASSCI |
| 590 | A | 121 | 473 | VTRAHCWKMERSLRQSLLEPVPPSLPNS |
| | | | | VLGWC/AELRVLCKLEENVQATNSPSEA |
| | | | | EEFQLEVSGLLGEMNCPYLSLTSGDVTK |
| | | | | RLLIQKNCLLLLTYLISELEAARMLCVN |
| | | | | APPKKS |
| 591 | A | 243 | 353 | DRVSLLLPRLDCNGTILVHCGLR/LPGFK |
| | | | | RFS\CLSLPS |
| 592 | A | 2 | 367 | QPQTDTMVHLTPEEKAAATVLWGKGN |
| | | | | VDEVGGEALVKLIGAYPWTQRFFESFGD |
| | | | | LSTPDAVMGNPNGKAHGAKVLGAFSDG |
| | | | | LAHLDNLKGTFATLSELHCDKLHVDAE |
| | | | | N/FMLLGNVLVCELA |
| 593 | A | 158 | 418 | IISVKRWMEPGQHGKTPPPLKIQRLAGH/ |
| | | | | SQVLRGLRHKNCLNPGDGGCSEPRVFH |
| | | | | CTPAWVTEEDPVSLSKKREMDGNNTTF |
| | | | | TPSQL |
| 594 | A | 1 | 418 | PQTQREPTMGLSAAD*TNV*AGWGKVG |
| | | | | AHAGEYGAEALERMFLSFPTTKTYFPHF |
| | | | | DLSHGYAQDKGHGMKVADALTNAVAH |
| | | | | VDDMPNALYALSDLHAHKL*VDPVNFK |
| | | | | LLNHCLVVTLACHLLAEVTPGVHAFLD |
| | | | | KFPG |
| 595 | A | 76 | 440 | SYPETWALEDASLEQMDNGYWGYMMT |
| | | | | DPVTLNVGGHLYTTILTTLTRYPDSMLG |
| | | | | AMNGGDFPTA*DPQGNYFIDLDGPLFRY |
| | | | | VLNFLRTSELTLPLDFKEFDLLLK*SDFY |
| | | | | QIEPLIQCIN |
| 596 | A | 83 | 341 | SFRRPMASASTQPAALSAEQAKASIH*FL |
| | | | | ALSAGPAVCSPTPTRDASLGCFWRAVVL |
| | | | | AEVIQAFSAPENAVRMDEARDNACNDM |
| | | | | GK |
| 597 | A | 102 | 1 | EHRPGVVAHACNPSTSGGQGEWIT*GQE |
| | | | | FKTSLG |
| 598 | A | 180 | 3 | KKKKKKKKRGEIGKFYSLLEELTARSWF |
| | | | | SCFFIF*DKQGLPWWLGISYKGSGQYDIQ |
| | | | | A |
| 599 | A | 64 | 326 | GAEVAPLSIYFTQVPVVHIYSVIMTRLVK |
| | | | | LAARKQSPFFLAVFGIYHLLITIHF*RQK |
| | | | | KKIYLSIYLSIYLSIYLSIYLNDLTEENC |
| 600 | A | 364 | 219 | NFCTTAS*GRGCSEPR*RHCTPAWVTDY |
| | | | | DSISNKN*TGGDFIKNIMRNLQDAIIGSV |
| | | | | YFHVERVNRLN |
| 601 | A | 61 | 284 | EDHHAGTLITALSSH*FFT*VGLEINMLA |
| | | | | FIPVLTKKKKKKRGGPFKGTKFKARGGG |
| | | | | RKNFFKGAPKLNSGAGV |
| 602 | A | 3 | 397 | VSEEKLLVRIPRVIGATYSLANERLRALE |
| | | | | DIEREIGAILQNAGTVILELSKEKTNERLL |
| | | | | DRQAAAFTASVQHVEAELSAQIRYLTQV |
| | | | | ATGQPHEGSSYSSRKDCQMALKRVDYA |
| | | | | RLKLSDVARTCEQMLEN |
| 603 | A | 110 | 370 | GTYALKIIGHKRSSEGVQRHHLKGITEIL |
| | | | | MNRPSARNALGNVFVSELLETLAQLRED |
| | | | | RQVRVLLFRSGVKGVFCAGADLLDREH |
| | | | | MS |
| 604 | A | 110 | 370 | GTYALKIIGHKRSSEGVQRHHLKGITEIL |
| | | | | MNRPSARNALGNVFVSELLETLAQLRED |
| | | | | RQVRVLLFRSGVKGVFCAGADLLDREH |
| | | | | MS |
| 605 | A | 110 | 370 | GTYALKIIGHKRSSEGVQRHHLKGITEIL |
| | | | | MNRPSARNALGNVFVSELLETLAQLRED |
| | | | | RQRVLLFRSGVKGVFCAGADLLDREH |
| | | | | MS |
| 606 | A | 42 | 385 | CSSEDKEDSFYPRNSKKKCKDFSKHQVF |
| | | | | CFVLRRESCSVARAGVQWRDLGSLQAP |
| | | | | PPGFTPFSWKGEDAVSLNRSIAPQPERQS |
| | | | | ETLGSNRLRRWRKNYKARRGGHMPVL |
| | | | | QVLS |
| 607 | A | 1 | 268 | RMKTILSNQTVDIPENVDITLKGRTGIVK |
| | | | | GPRGTLRRDFNHINVELSLLGKKKKRLR |
| | | | | VDKWRGNTKELSTDRTMCIHCHNMIMV |
| | | | | VIHVW |
| 608 | A | 101 | 3 | KHTLGWVQWLMPAIPALWEAKVGRSL |
| | | | | ETHASA |
| 609 | A | 3 | 299 | FHFFRKPPESKKPSVPETEADGFVLLGDT |
| | | | | TDEQRMTARGKTSDIEANQPLETNKENS |
| | | | | SSVTVSDPEMENKAGQTLENSSLMAELL |
| | | | | SDVPVTLAPHVLAG |
| 610 | A | 283 | 3 | LALFYPQIKAIIFFFYLINASNGSILFFSGP |
| | | | | FHTCSLKSSGALWCMIFRGRFHSLVCFS |
| | | | | RLSGVLMEVEEHEVLQDSLDRCYSTPPM |
| | | | | FFDIPD |
| 611 | A | 2 | 363 | NSAPEAGSCWKMKVNISFPATGCQKLIE |
| | | | | VDDERKLRTFYDNRMAPEVAVDALVEE |
| | | | | WKGYVVRIIGGNDKQGFPMKHGDLTHG |
| | | | | RVRLLLSKGHSCYRPRRTGERKRKSLRG |
| | | | | CIVDANLSVL |
| 612 | A | 56 | 415 | ALIMSFIFEGIYDGFSSVLQFLGLYKKSG |
| | | | | KLVFLGLDNAGKTTLLHMLKDDRLGQH |
| | | | | VPTLHPTSEELTIAGMTFTTFDLGGHEQA |
| | | | | RRVWKNYLPAINGIVFLVDCADHSRLVE |
| | | | | SKVELNA |
| 613 | A | 32 | 240 | RGIPRLERPNPSLTLAPDTQDLFKLCCKC |
| | | | | NKSDPVPPLTRKKKKKKKKKKKKKKKK |
| | | | | KKKKKKKKKRGAL |
| 614 | A | 218 | 429 | ELAPLQSLRKGPGLLSPPRACPVPTPAVS |
| | | | | RTLLGNFEESLLRGRFAPSGHIDGYTAEI |
| | | | | GASGSYCPQHVT |
| 615 | A | 67 | 1204 | VPAQPPKSRLSRGELLGLKRPVLVRPRW |
| | | | | VGSEQAEATMEQCACVERELDKVLQKF |
| | | | | LTYGQHCERSLEELLHYVGQLRAELASA |
| | | | | ALQGTPLSATLSLVMSQCCRKIKDTVQK |
| | | | | LASDHKDIHSSVSRVGKAIDRNFDSEICG |
| | | | | VVSDAVWDAREQQQQILQMAIVEHLYQ |
| | | | | QGMLSVAEELCQESTLNVDLDFKQPFLE |
| | | | | LNRILEALHEQDLGPALEWAVSHRQRLL |
| | | | | ELNSSLEFKLHRLHFIRLLAGGPAKQLEA |
| | | | | LSYARHFQPFARLHQREIQVMMGSLVY |
| | | | | LRLGLEKSPYCHLLDSSHWAEICETFTR |
| | | | | DACSLLGLSVESPLSVSFASGCVALPVL |
| | | | | MNIKAVIEQRQCTGVWNHKDELPIEIEL |
| | | | | GMKCWYHSVFACPILY |
| 616 | A | 220 | 627 | VGPKFEPDRSAGRRLAVVFRGNTPSLWL |
| | | | | SMSIVTVQLGQCGNQIGFEVFDALLSDS |
| | | | | HSSQGLCSMRENEAYQASCKERFFSEEE |
| | | | | NGVPIARAVLVDMEPKVINQTLSKAAQS |
| | | | | GQWKYGQHACFCQKQGSGNNWAYG |
| 617 | A | 220 | 627 | VGPKFEPDRSAGRRLAVVFRGNTPSLWL |
| | | | | SMSIVTVQLGQCGNQIGFEVFDALLSDS |
| | | | | HSSQGLCSMRENEAYQASCKERFFSEEE |
| | | | | NGVPIARAVLVDMEPKVINQTLSKAAQS |
| | | | | GQWKYGQHACFCQKQGSGNNWAYG |
| 618 | A | 244 | 459 | CTWNENQRMEIVWEVLFLLQANFIVCIS |
| | | | | AQQNSPKIHEGWWAYKEVVQGSFVPVP |
| | | | | SFWGLVNSAWNLCSVGK |
| 619 | A | 258 | 387 | LNYHQNINDFFETESHSVTRLECSGTILA |
| | | | | QCNLCLLSPSDSPP |
| 620 | A | 4 | 281 | RHIVIGEGKLKGQPGASVAAPCVRLVPH |
| | | | | SIPVLALSPGLLCSARS\TKQKNSCQQLK |
| | | | | EDVD\QTKWGTDTPSMD*ILMEEVKLEE |
| | | | | QLKEVVEEYKLALSDTEGLQQSIQKLVD |
| | | | | EANMCSIQGFCMDSLEVADVLENGTQC |
| | | | | VS*QKNSCQQLKEDVDPNQMGDRYSLY |
| | | | | GLDTHGRSQVRRATEGGCGRI |
| 621 | A | 648 | 937 | RKGQQQTCLS\LRVSWLYRKVTFSIFFFF |
| | | | | LIL*K*RWGLTMVTQAGLKLLGTSNPPA |
| | | | | FALPKCWDYRCKSLPPAQKLTFSKATTK |
| | | | | KTPQICQSMKVS |
| 622 | A | 3 | 816 | HETMEAAPSRFMFLLFLLTCELAAEVAA |
| | | | | EVEKSSDGPGAAQEPTWLTDVPAAMEFI |
| | | | | AATEDLEIPAVPILHSMVQKFPGVSFGIS |
| | | | | TDSEVLTHYNITGNTICLFRLVDNEQLDL |
| | | | | EDEDIESIDATKLSRFIEINSLHMVTEYNP |
| | | | | VTVIGLFNSVIQIHLLLINE/PRPPQKYEE |
| | | | | NMHRYQKAAKLFQGKIPPLFLVGQL\DE |
| | | | | RKMGKVISFFKLKESQLPAL\QFTRL*DD |
| | | | | EWDTLPTAEVSVEHVQNFCDGFLSGKLL |
| | | | | KENRESEGKTPKVEL |
| 623 | A | 15 | 286 | DRVSL/LSPRLECSGVVSAHCKLRLPGSR |
| | | | | /RFSCLSLS\GSWDYRRPPPRPANFFVFLV |
| | | | | ETGFHCGLDLLTS*SARLGLPKCWDYKR |
| | | | | EPPHPA |
| 624 | A | 2411 | 325 | NSSWPAEPAASPWRPLWRALGATFPSGS |
| | | | | QPAARTPAGPCIGGMAPPGFKHVSSMLA |
| | | | | \LTIIAST\WALTPTHYLTKHDVERLKASL |
| | | | | DRPFTNLESAFYS\IVGLSSLG\AQVP\DA |
| | | | | KKACTYI\RSNLDP\SNV\DSLFYGWPRAS |
| | | | | Q\ALSGM*RSLFSNE\TKDLAFGQLFS*GT |
| | | | | SSVYPRSYHAS/VAALKWALGLPLASQE |
| | | | | ALSALTARLSKEETVLATVQALQTASHL |
| | | | | SQQADLRSIVEEIEDLVARLDELGGVYL |
| | | | | Q\FEEGLEFTTAL\FVAATYKA/LMDH\VG |
| | | | | TE\PSIKE\DQVIQLMN\AIF\SKKNFE\SLS |
| | | | | EAFSV\ASAAAVLSHNRYHVPVVVVPEG |
| | | | | SASDTHEQAILRLQVTNVLSQPLTQATV |
| | | | | KLEHAKSVAS\RATVLQKTSPTP\VGIVFE |
| | | | | LNFMN\VKFS\SGY\YDFLGRKLKGDNRY |
| | | | | IS\NTVELRVQDPPTEVGITNVDLSTV\DK |
| | | | | DQSIAP\QTTRVTYP\AKAKGTFIADSHQ |
| | | | | NFALFFQL\VGVNTGAELTPHQTFVRLH |
| | | | | NQKTGQ\EVVFVAEPDNKNVYKFELDTS |
| | | | | ERKGLNLTSRSGTYTFY\LIIGDATLKNPI |
| | | | | LWNVADVVIKFPEEEAPSTVLSQNLFTP |
| | | | | KQEIQHLFREPEKRPPTVVSNTFTALILSP |
| | | | | LLLLFALWLRIGANVSNFTFAPSTIIFHLG |
| | | | | HAAMLGLMYVYWTQLNMFQTLKYLAI |
| | | | | LGSVTFLAGNRMLAQQAVKRTAH |
| 625 | A | 498 | 915 | QGSKVFIKKCST/SSLTREMQISTQRSHC |
| | | | | GTLI*ASEVRK/SG*HQCQR*LWEGDL\L |
| | | | | HC**QCELMEPTWKMAWHQLLEKKTHS |
| | | | | PL/DLPVPHQGLDMAVM/CYQGA/CARN |
| | | | | LYSQILTIAPNWNQPTYPSGREWMLKNA |
| | | | | RIAIG |
| 626 | A | 130 | 1081 | SVSTTRSFSVDSSAKTAAMPVTVTRTTIT |
| | | | | TTTTSSSGLGSPMIVGSPRALTQPLGLLR |
| | | | | LLQLVSTCVAFSLVASVGAWTGSMGNW |
| | | | | SMFTWCFCFSVTLIILIVEL\SGLQARFPL |
| | | | | SWRNFPITFACYAALFCLSASIIYPTTYV |
| | | | | QFLSHGRSRDHAIAATFFSCIACVAYATE |
| | | | | VAWTRARPGEITGYMATVPGLLKVLET |
| | | | | FVACIIFAFISDPNLYQHQPALEWCVAVY |
| | | | | AICFILAAIAILLNLGECTNVLPIPFPSFLS |
| | | | | GLA\FCLSSSMPPPLFSGPSTSSMRSMAA |
| | | | | SLGAREM*AAAAAMPTTCVPGTADWL |
| | | | | WPS |
| 627 | A | 1 | 2059 | GCQRFMINMGDSHVDTSSTVSEAVAEE |
| | | | | VSLFSMTDMILFSLIVGLLTYWFLFRKK |
| | | | | KEEVPEFTKIQTLTSSVRESSFVEKMKKT |
| | | | | GRNIIVFYGSQTGTAEEFANRLSKDAHR |
| | | | | YGMRGMSADPEEYDLADLSSLPEIDNAL |
| | | | | VVFCMATYGEGDPTDNAQDFYDWLQE |
| | | | | TDVDLSGVKFAVFGLGNKTYEHFNAMG |
| | | | | KYVDKRLEQLGAQRIFELGLGDDDGNL |
| | | | | EEDFITWREQFWPAVCEHFGVEATGEES |
| | | | | SIRQYELVVHTDIDAAKVYMGEMGRLK |
| | | | | SYENQKPPFDAKNPFLAAVTTNRKLNQ |
| | | | | GTERHLMHLELDISDSKIRYESGDHV\AV |
| | | | | YPANDSALVNQLGKILGADLDVVMSLN |
| | | | | NLDEESNKKHPFPCPTSYRTALTYYLDIT |
| | | | | NPPRTNVLYELAQYASEPSEQELLRKMA |
| | | | | SSSGEGKELYLSWVVEARRHILAILQDC |
| | | | | PSLRPPIDHLCELLPRLQARYYSIASSSKV |
| | | | | HPNSVHICAVVVEYETKAGRINKGVATN |
| | | | | WLRAKEPVGENGGRALVPMFVRKSQFR |
| | | | | LPFKATTPVIMVGPGTGVAPFIGFIQERA |
| | | | | WLRQQGKEVGETLLYYGCRRSDEDYLY |
| | | | | REELAQFHRDGALTQLNVAFSREQSHK |
| | | | | VYVQHLLKQDREHLWKLIEGGAHIYVC |
| | | | | GDARNMARDVQNTFYDIVAELGAMEH |
| | | | | AQAVDYIKKLMTKGRYSLDVWS |
| 628 | A | 1 | 1770 | MSRRLLPRAEKRRRRLEQRQQPDEQRR |
| | | | | RSGAMVKMAAAGGGGGGGRYYGGGSE |
| | | | | GGRAPKRLKTDNAGDQHGGGGGGGGG |
| | | | | AGAAGGGGGGENYDDPHKTPASPVVHI |
| | | | | RGLIDGVVEADLVEALQEFGPISYVVVM |
| | | | | PKKRQALVEFEDVLGACNAVNYAADN |
| | | | | QIYIAGHPAFVNYSTSQKISRPGDSDDSR |
| | | | | SVNSVLLFTILNIPIYSITTDVLYTICNPCG |
| | | | | PVQRIVIFRKNGVQAMYEFDSVQSAQRA |
| | | | | KASLNGADIYSGCCTLKIEYAKPTRLNV |
| | | | | FKNDQDTWDYTNPNLSGQGDPGSNPNK |
| | | | | RQRQPPLLGDHPAEYGGPHGGYHSHYH |
| | | | | DEGYGPPPPHYEGRRMGPPVGGHRRGP |
| | | | | SRYGPQYGHPPPP\PPPPEYGPHADSPVL |
| | | | | MVYGLDQSKMNCDRVFNVFCLYGNVE |
| | | | | KVKFMKSKPGAAMVEMADGYAVDRAI |
| | | | | THLNNNFMFGQKLNYCVSKQPAIMPGQ |
| | | | | SYGLEDGSCSYKDFSESRNNRFSTPEQA |
| | | | | AKNRIQHPSNVLHFFNAPLEVTEENFFEI |
| | | | | CDELGVKRPSSVKVFSGKSERSSSGLLE |
| | | | | WESKSDALETLGFLNHYQMKNPNGPYP |
| | | | | YTLKLCFSTAQHAS |
| 629 | A | 1826 | 5 | SNLPEANVMSIVIPLGVDTAETSYLEMA |
| | | | | AGSEPESVEASPVVVEKSNSYPHQLYTS |
| | | | | SSHHSHSYNGFAPMRTHNRVLVPPPNTP |
| | | | | APPPP\SVLISKNEVGHIYPLPNFDETSQC |
| | | | | LPTISTS\EDGSYGTDVT\RCICGFTHDDG |
| | | | | YMICCDKCSVWQHIDCMGIDRQHIPDTY |
| | | | | LCERCQPRNLDKERAVLLQRRKRENMS |
| | | | | DGDTSATESGDEVPVELYTAFQHTPTSIT |
| | | | | LTASRVSKVNDKRRRKKSGEKEQHISKCK |
| | | | | KGSAPEIDPSSDGSNFGWETKIKAWMDR |
| | | | | YEEANNNQYSEGVQREAQRIALRLGNG |
| | | | | NDKKEMNKSDLNTNNLLFKPPVESHIQK |
| | | | | NK\KILKSAK\DWPP\DALIIEYRGKFM\L |
| | | | | R\EQFEANGYFF\KRP\YPFVLF\YSKF\HG |
| | | | | LEMCVDARTFGNEARFIRRSCTPNAEVR |
| | | | | HEIQDGTIHLYIYSIHSIPKGTEITIAFDFD |
| | | | | YGNCKYKVDCACLKENPECPVLKRSSES |
| | | | | MENINSGYETRRKKGKKDKDISKEKDT |
| | | | | QNQNITLDCEGTTNKMKSPETKQRKLSP |
| | | | | LRLSVSNNQEPDFIDDIEEKTPISNEVEM |
| | | | | ESEEQIAERKRKMNWTVDGCGSWFWFR |
| | | | | AEASVKALGLTLNVLFG |
| 630 | A | 1826 | 5 | SNLPEANVMSIVIPLGVDTAETSYLEMA |
| | | | | AGSEPESVEASPVVVEKSNSYPHQLYTS |
| | | | | SSHHSHSYNGFAPMRTHNRVLVPPPNTP |
| | | | | APPPP\SVLISKNEVGHIYPLPNFDETSQC |
| | | | | LPTISTS\EDGSYGTDVT\RCICGFTHDDG |
| | | | | YMICCDKCSVWQHIDCMGIDRQHIPDTY |
| | | | | LCERCQPRNLDKERAVLLQRRKRENMS |
| | | | | DGDTSATESGDEVPVELYTAFQHTPTSIT |
| | | | | LTASRVSKVNDKRRKKSGEKEQHISKCK |
| | | | | KGSAPEIDPSSDGSNFGWETKIKAWMDR |
| | | | | YEEANNNQYSEGVQREAQRIALRLGNG |
| | | | | NDKKEMNKSDLNTNNLLFKPPVESHIQK |
| | | | | NK\KILKSAK\DWPP\DALIIEYRGKFM\L |
| | | | | R\EQFEANGYFF\KRP\YPFVLF\YSKF\HG |
| | | | | LEMCVDARTFGNEARFIRRSCTPNAEVR |
| | | | | HEIQDGTIHLYIYSIHSIPKGTEITIAFDFD |
| | | | | YGNCKYKVDCACLKENPECPVLKRSSES |
| | | | | MENINSGYETRRKKGKKDKDISKEKDT |
| | | | | QNQNITLDCEGTTNKMKSPETKQRKLSP |
| | | | | LRLSVSNNQEPDFIDDIEEKTPISNEVEM |
| | | | | ESEEQIAERKRKMNWTVDGCGSWFWFR |
| | | | | AEASVKALGLTLNVLFG |
| 631 | A | 1197 | 878 | LGHCNLSIYSYEIKTGVPSPRGMIYLLLC |
| | | | | VCVCVCLPNHAIIVMLNRTEPYVPEGGA |
| | | | | YLPEREPFIVPVEPERTAEYEDYGADEPA |
| | | | | EEPPEPHRRWR\RALPHGPGQ |
| 632 | A | 164 | 418 | QIESSSLNVNKKDNHTKTPSEGHQHQRP |
| | | | | KVDKSLKMRKKQRKKAENSKNQNASSP |
| | | | | PKEHNSSPAKEQN*TENEFDELTEVGFR |
| | | | | M |
| 633 | A | 351 | 463 | MESCSVTQVGVQWHNQLTATPPPRFKR |
| | | | | LSS*DYRACI |
| 634 | A | 88 | 328 | RHKKRCLTYLTIK*MQIKTKMRYHFTHS |
| | | | | RMFIVKKDSKCWQICGEIEILTHCWWKC |
| | | | | TMVQSLWKIV*PFLKMMEKMRSEF |
| 635 | A | 434 | 1142 | AQGPYLARHEPLTASSLSRSAMSSEPPPP |
| | | | | PQPPTHQASVGLLDTPWSRERSPSPLRG |
| | | | | NVVPSPLPTRRTRTFSA*VTGSSGLGSTL |
| | | | | NLQGAFLVSHPQPTAQPQVCLFGSPGHR |
| | | | | PKNGQRHSESLASGKRSI |
| 636 | A | 1931 | 233 | FPARPTRPRTRGGVVVGAAAAGPRCGS |
| | | | | ARAQVAEGAVRNIQAEGHRQIPDLTWT |
| | | | | TLLLLARLPFNSPPLRSGLAPPPDLSLVLL |
| | | | | QALTLDLRWLPHLSGAMATGADVRDIL |
| | | | | ELGGPEGDAASGTISKKDIINPDKKKSKK |
| | | | | SSETLTFKRPEGMHREVYALLYSDKKDA |
| | | | | PPLLPSDTGQGYRTVKAKLGSKKVRPW |
| | | | | KWMPFTNPARKDGAMFFHWRRAAEEG |
| | | | | KDYPFARFNKTVQVPVYSEQEYQLYLH |
| | | | | DDAWTKAETDHLFDLSRREDLRFVVIHD |
| | | | | RYDHQQFKKRSVEDLKERYYHICAKLA |
| | | | | NVRAVPGTDLKIPVFDAGHERRRKEQLE |
| | | | | RLYNRTPEQVAEEEYLLQELRKIEARKK |
| | | | | EREKRSQDLQKLITAADTTAEQRRTERK |
| | | | | APKKKLPQKKEAEKPAVPETAGIKFPDF |
| | | | | KSAGVTLRSQRMKLPSSVGQKKIKALEQ |
| | | | | MLLELGVELSPTPTEELVHMFNELRSDL |
| | | | | VLLYELKQACANCEYELQMLRHRHEAL |
| | | | | ARAGVLGGPATPASGPGPASAEPAVTEP |
| | | | | GLGPDPKDTIIDVVGAPLTPNSRKRRESA |
| | | | | SSSSSVKKAKKP |
| 637 | A | 1931 | 233 | FPARPTRPRTRGGVVVGAAAAGPRCGS |
| | | | | ARAQVAEGAVRNIQAEGHRQIPDLTWT |
| | | | | TLLLLARPFNSPPLRSGLAPPPDLSLVLL |
| | | | | QALTLDLRWLPHLSGAMATGADVRDIL |
| | | | | ELGGPEGDAASGTISKKDIINPDKKKSKK |
| | | | | SSETLTFKRPEGMHREVYALLYSDKKDA |
| | | | | PPLLPSDTGQGYRTVKAKLGSKKVRPW |
| | | | | KWMPFTNPARKDGAMFFHWRRAAEEG |
| | | | | KDYPFARFNKTVQVPVYSEQEYQLYLH |
| | | | | DDAWTKAETDHLFDLSRRPDLRFVVIHD |
| | | | | RYDHQQFKKRSVEDLKERYYHICAKLA |
| | | | | NVRAVPGTDLKIPVFDAGHERRRKEQLE |
| | | | | RLYNRTPEQVAEEEYLLQELRKIEARKK |
| | | | | EREKRSQDLQKLITAADTTAEQRRTERK |
| | | | | APKKKLPQKKEAEKPAVPETAGIKFPDF |
| | | | | KSAGVTLRSQRMKLPSSVGQKKIKALEQ |
| | | | | MLLELGVELSPTPTEELVHMFNELRSDL |
| | | | | VLLYELKQACANCEYELQMLRHRHEAL |
| | | | | ARAGVLGGPATPASGPGPASAEPAVTEP |
| | | | | GLGPDPKDTIIDVVGAPLTPNSRKRRESA |
| | | | | SSSSSVKKAKKP |
| 638 | A | 390 | 1258 | LTRAPPPSTQVRPVPGPPAGAVVAAPGG |
| | | | | ALASVSFDSRDSKMAAQSAPKVVLKSTT |
| | | | | KMSLNERFTNMLKNKQPTPVNIRASMQ |
| | | | | QQQQLASARNRRLAQQMENRPSVQAAL |
| | | | | KLKQSLKQRLGKSNIQARLGRPIGALAR |
| | | | | GAIGGRQLPIIQRGLPRGGLRGGRATRTL |
| | | | | LRGGMSLRGQNLLRGGRAVAPRMGLRR |
| | | | | GGVRGRGGPGRGGLGRGAMGRGGIGG |
| | | | | RGRGMIGRGRGGFGGRGRGRGRGRGAL |
| | | | | ARPVLTKEQLDNQLDAYMSKTKGHLDA |
| | | | | ELDAYMAQTDPETND |
| 639 | A | 1727 | 834 | RPAEPDPGSGHPEPKSPTLSAVMSAEVK |
| | | | | VTGQNQEQFLLLAKSAKGAALATLIHQ |
| | | | | VLEAPGVYVFGELLDMPNVRELAESDF |
| | | | | ASTFRLLTVFAYGTYADYLAEARNLPPL |
| | | | | TEAQKNKLRHLSVVTLAAKVKCIPYAV |
| | | | | LLEALALRNVRQLEDLVIEAVYADVLRG |
| | | | | SLDQRNQRLEVDYSIGRDIQRQDLSAIAR |
| | | | | TLQEWCVGCEVVLSGIEEQVSRANQHK |
| | | | | EQQLGLKQQIESEVANLKKTIKVTTAAA |
| | | | | AAATSQDPEQHLTELREPAPGTNQRQPS |
| | | | | KKASKGKGLRGSAKIWSKSN |
| 640 | A | 56 | 443 | RLHVVPMARYEEVSVSGFEEFHRAVEQ |
| | | | | HNGKTIFAYFTGSKDAGGKSWCPDCVQ |
| | | | | AEPVVREGLKHISEGCVFIYCQVGEKPY |
| | | | | WKDPNNDFRKNLKVTAVPTLLKYGTPQ |
| | | | | KLVESECLQANLVEMLFSED |
| 641 | A | 320 | 43 | LFYEEFSYATILTISSSEQKNSIKKSTFCLT |
| | | | | LLPRLECSGAVMARCSLNLLGSGDPPAS |
| | | | | ASQVAGTTGACHHTSLIFPFVLYVDSTG |
| | | | | LTLKT |
| 642 | A | 45 | 400 | DPRVRTREWDSLNYENHIYLMPFIYINII |
| | | | | LGGTISLLGRLVYRSHLISSLLCLEGIILSL |
| | | | | FIIATLITLNTHSLLTNIGPIAILVFAACEA |
| | | | | AGGLSLLGSISNTYGLNYVHNLNLLQC |
| 643 | A | 3828 | 2909 | AECEEVRRKSELFNPVSLDCKLRQKAIA |
| | | | | EVDVGTDKAQNSDPILDTSSLVPGCSSV |
| | | | | DNIKSSQTSQNQGLGRPTLEGDEETSEVE |
| | | | | YTVNKGPASSNRDRVPPSSEASEHHPRH |
| | | | | RVSSQAEDTSSSFDNLFIDRLQRITIADQ |
| | | | | GEQQSEENASTKNLTGLSSGTEKKPHYM |
| | | | | EVLEMRAKNPVPQLRKFKTNVLPFRQN |
| | | | | DSSSHCQKSGSPISSEERRRRDKQNLDDI |
| | | | | TAARLLPLHHMPTQLLSIEESLALQKQQ |
| | | | | KQNYEEMQAKLAAQKLAERLNIKMRSY |
| | | | | NPEGESSGRYREVRDEDDDWSSDEF |
| 644 | A | 3 | 2185 | RPYLGLLKMAALEEEFTLSSVVLSAGPE |
| | | | | GLLGVEQSDKTDQFLVTDSGRTVILYKV |
| | | | | SDQKLPLGSWSVKQGQIITCPAVCNFQTG |
| | | | | EYVVVHDNKVLRIWNNEDVNLDKVFK |
| | | | | ATLSAEVYRILSVQGTEPLVLFKEGAVR |
| | | | | GLEALLADPQQKIETVISDEEVIKWTKFF |
| | | | | VVFRHPVLIFITEKHGNYFAYVQMFNSRI |
| | | | | LTKYTLLLGQDENSVIKSFTASVDRKFIS |
| | | | | LMSLSSDGCIYETLIPIRPADPEKNQSLV |
| | | | | KSLLLKAVVSGNARNGVALTALDQDHV |
| | | | | AVLGSPLAASKECLSVWNIKFQTLQTSK |
| | | | | ELPQGTSGQLWYYGEHLFMLHGKSLTVI |
| | | | | PYKCEVSSLAGALGKLKHSQDPGTHVV |
| | | | | SHFVNWETPQGCGLGFQNSEQSRRILRR |
| | | | | RKIEVSLQPEVPPSKQLLSTIMKDSEKHIE |
| | | | | VEVRKFLALKQTPDFHTVIGDTVTGLLE |
| | | | | RCKAEPSFYPRNCLMQLIQTHVLSYSLC |
| | | | | PDLMEIALKKKDVQLLQLCLQQFPDIPES |
| | | | | VTCACLKIFLSIGDDSLQETDVNMESVF |
| | | | | DYSINSVHDEKMEEQTEILQNGFNPEED |
| | | | | KCNNCDQELNKKPQDETKESTSCPVVQ |
| | | | | KRAALLNAILHSAYSETFLLPHLKDIPAQ |
| | | | | HITLFLKYLYFLYLKCSENATMTLPGIHP |
| | | | | PTLNQIMDWICLLLDANFTVVVMMPEA |
| | | | | KRLLINLYKLVKSQISVYSELNKIEVSFR |
| | | | | ELQKLNQEKNNRGLYSIEVLELF |
| 645 | A | 118 | 473 | WWPVLRRWTMKTFRWKVKPGMDVAS |
| | | | | VPSVRKVRFGDGYSQRAPAGLNANLKT |
| | | | | YSVTLSVPREEATVLESFLEEHGGWKSF |
| | | | | LWTPPYEWRQIKVTCAKWSSRVSMLRV |
| | | | | EFSAEFEQVVN |
| 646 | A | 138 | 632 | QSVWVAQPPAVTADLQFLEGSGEKNAP |
| | | | | TAVLRKRQEEMRPLDIDEVEAPEEVEVL |
| | | | | EPEEDFEQFLLPVINEMREDIASLIREHGR |
| | | | | AYLRTRSKLWEMDNMLIQIKTQVEASEE |
| | | | | SALNHVQHPSGEADERVSELCEKAEEKA |
| | | | | KEIAKMAEMLVELVWRIERSESS |
| 647 | A | 2224 | 1709 | QASGLYSFLTLAPMTHLLLTATVTPSEQ |
| | | | | NSSREPGWETAMAKDILGEAGLHFDEL |
| | | | | NKLRVLDPEVTQQTIELKEECKDFVDKI |
| | | | | GQFQKIVGGLIELVDQLAKEAENEKMK |
| | | | | AIGARNLLKSIAKQREAQQQQLQALIAE |
| | | | | KKMQLERYRVEYEALCKVEARQNEFID |
| | | | | QFIFQK |
| 648 | A | 84 | 816 | TGNKMQDPNADTEWNDILRKKGILPPK |
| | | | | ESLKELEEEAEEEQRILQQSVVKTYEDM |
| | | | | TLEELEDHEDEFNEEDERAIEMYRRRRL |
| | | | | AEWKATKLKNKFGEVLEISGKDYVQEV |
| | | | | TKAGEGLWVILHLYKQGIPLCALINQHL |
| | | | | SGLARKFPDVKFIKAISTTCIPNYPDRNLP |
| | | | | TIFVYLEGDIKAQFIGPLVFGGMNLTRDE |
| | | | | LEWKLSESGAIMTDLEENPKKPIEDVLLS |
| | | | | SVRRSVLMKRDSDSEGD |
| 649 | A | 62 | 413 | MTRQEELAAARAALHDLMTGKRVATV |
| | | | | QKDGRRVEFTATSVSDLKKYIAELEVQT |
| | | | | GMTQRRTGPAGFYV |
| 650 | A | 196 | 339 | RSYFPYSPGMFGDDCHQLCDCEGETFCH |
| | | | | PKTEKCLCPRGRTGARCDAG |
| 651 | A | 1280 | 906 | LRMTTATRQEVLGLYRSIFRLARKWQA |
| | | | | TSGQMEDTIKEKQYILNEARTLFRKNKN |
| | | | | LTDTDLIKQCIDECTARIEIGLHYKIPYPR |
| | | | | PIHLPPMGLTPLRGRGLRSQEKLRKLSKP |
| | | | | VYLRSHDEVS |
| 652 | A | 1359 | 39 | CDAPLGGSIAGPFDQLEEILGWESAAAH |
| | | | | SAELVAKGTVGKRKWGCAGASSSGSAL |
| | | | | LPPCRELLMGHRFLRGLLTLLLPPPPLYT |
| | | | | RHRMLGPESVPPPKRSRSKLMAPPRIGT |
| | | | | HNGTFHCDEALACALLRLLPEYRDAEIV |
| | | | | RTRDPEKLASCDIVVDVGGEYDPRRHRY |
| | | | | DHHQRSFTETMSSLSPGKPWQTKLSSAG |
| | | | | LIYLHFGHKLLAQLLGTSEEDSMVGTLY |
| | | | | DKMYENFVEEVDAVDNGISQWAEGEPR |
| | | | | YALTTTLSARVARLNPTWNHIPDQDTEA |
| | | | | GFKRAMDLVQEEFLQRLDFYQHSWLPA |
| | | | | RALVEEALAQRFQVDPSGEIVELAKGAC |
| | | | | PWKEHLYHLESGLSPPVAIFFVIYTDQAG |
| | | | | QWRIQCVPKEPHSFQSRLPLPEPWRGLR |
| | | | | DEALDQVSGIPGCIFVHASGFIGGHRTRE |
| | | | | GALSMARATLAQRSYLPQIS |
| 653 | A | 3 | 1652 | QNAKVGSEAIQVLPAFPREVQRLPEPAK |
| | | | | SCRQRQLEARKAAAEKKKIQKEKLSTPE |
| | | | | KIKQEALELAGITSDPGLSLKGGLSQQGL |
| | | | | KPSLKVEPQNHFSSFKYSGNAVVESYSV |
| | | | | LGNCRPSDPYSMNSVYSYHSYYAQPSLT |
| | | | | SVNGFHSKYALPSFSYYGFPSSNPVFPSQ |
| | | | | FLGPGAWGHSGSSGSFEKKPDLHALHNS |
| | | | | LSPAYGGAEFAELPSQAVPTDAHHPTPH |
| | | | | HQQPAYPGPKEYLLPKAPLLHSVSRDPS |
| | | | | PFAQSSNCYNRSIKQEPVDPLTQAEPVPR |
| | | | | DAGKMGKTPLSEVSQNGGPSHLWGQYS |
| | | | | GGPSMSPKRTNGVGGSWGVFSSGESPAI |
| | | | | VPDKLSSFGASCLAPSHFTDGQWGLFPG |
| | | | | EGQQAASHSGGRLRGKPWSPCKFGNST |
| | | | | SALAGPSLTEKPWALGAGDFNSALKGSP |
| | | | | GFQDKLWNPMKGEEGRIPAAGASQLVF |
| | | | | YQHKNLNQPNHGLALWEAKMKQLAER |
| | | | | ARARQEEAARLGLGQQEAKLYGKKRK |
| | | | | WGGTVVAEPQQKEKKGVVPTRQALAV |
| | | | | PTDSAVTVSSYAYTKVTGPYSRWI |
| 654 | A | 653 | 2 | KYRWGFTVLARMVSIS*SRDLPVSASQS |
| | | | | AGIIGVSHRARPRFYFLISLWHLLYFLIFF |
| | | | | QS*Q*MKNLCLKKLPDDSNYCSCTTLFK/ |
| | | | | TGNLSCLPDILCTKS*YSVS/CKSFANSYI |
| | | | | QKKHDKM*KEGVR*GIINNLRLSIILILI |
| | | | | LIS*LSYFNDFH*NSGTSLIVS*HYYLNKH |
| | | | | DLHPNYFILLFCFSF/VRQGLRSVAQAGV |
| | | | | QWCDLGSLEPPPPRF |
| 655 | N | 415 | 0 | SKSPPPKRKLFPSSPPKTFYPPPHSGVFPP |
| | | | | FPP*NFFFSPRGLIFGGGFFQFFPPPKKRFF |
| | | | | SKIPEAFLKVPPKRKKIVFATAPV/YFGPP |
| | | | | REFFKGPPP |
| 656 | A | 429 | 0 | PSSSSPFFFFFPPPQKGIFFPPFFFCFPRVFS |
| | | | | PPPFFIPPPRIFFLGPLKKKKTPPPPGGKNF |
| | | | | FF*RAPPSP |
| 657 | A | 222 | 140 | GYWGCAIGKARQAAKTEIEKLQVIINA |
| 658 | A | 30 | 250 | YPMFQVQPVQHVYPAQVQYVEGGDAV |
| | | | | YTNGAMCVLLPRATPGTLSLTPAFATW |
| | | | | GGIKQIPLPYAFGDVFTKYC |
| 659 | A | 1 | 707 | HRPDGCPDIGPTGELSGSLKIPNRDSGIDS |
| | | | | PSSSVAGENFPCEEGLEAGPSPTVLGAH |
| | | | | AEMALDSQVPKVTPQEEADSDVGEEPD |
| | | | | SENTPQKADKDAGLAQHSGPQKLLHIA |
| | | | | QELLHTEETYVKRLHLLDQVFCTRLTDA |
| | | | | GIPPEVIMGIFSNISSIHRFHGQFLLPELKT |
| | | | | RITEEWDTNPRLGDILQKLAPFLKMYGE |
| | | | | YVKNFDRAVGLVSTWTQRSPLFKDVVH |
| | | | | SIQVRRRRG |
| 660 | A | 379 | 3 | MAEMQLAELRAEIKHFVSERKYDEELG |
| | | | | KAARFSCDIEQLKAQIMLCGEIPHPKNN |
| | | | | YSSRTPCSSLLPLLNAHAATSGKQSNFSR |
| | | | | KSSTHNKPSEGKAANPKMVSSLPSTADP |
| | | | | SHQTMTANKQNGE |
| 661 | A | 379 | 3 | MAEMQLAELRAEIKHFVSERKYDEELG |
| | | | | KAARFSCDIEQLKAQIMLCGEIPHPKNN |
| | | | | YSSRTPCSSLLPLLNAHAATSGKQSNFSR |
| | | | | KSSTHNKPSEGKAANPKMVSSLPSTADP |
| | | | | SHQTMTANKQNGE |
| 662 | A | 3 | 783 | TLQTLAPATVQTVAAPQVQQVPVSGWK |
| | | | | GFREALVGAVNWSLVEDVVFMAAVQN |
| | | | | PALTALTTPIQTAALQVPVRAAFSPTLLP |
| | | | | PPLFLEVLVFRDVKQVPGGVKQLEPPKE |
| | | | | GERRTT\HNIIEKRIRSS\INDKIIELKDLV |
| | | | | MGTDAKVGAKQNCVLCSTISPLPVFASG |
| | | | | A*RSPRLKVSEYKTELEVLFY*SILVSCQ |
| | | | | DYKILKNIRDW*GLIRQ*PAETFDSFGYA |
| | | | | LQLMGTPLSEAEKDACHSVVPDTGLCVP |
| | | | | WSQLMA |
| 663 | A | 346 | 28 | YITPGICPSLSTMKALVECAGGKVLSKQP |
| | | | | SFRKLMEHKQNSVGRVESASESVIALYH |
| | | | | IQRSVTEKLIFFSL\SLSEIILISCENDLHLC |
| | | | | REYFARGIGTFPRLPV |
| 664 | A | 558 | 175 | ASLSCGGLHPVRASWLLCLTKQAWAME |
| | | | | GAPPPASLPPCSLISDCCASNQRDSVGVG |
| | | | | PSEPCAGYNLVVRRFLSRSEKRNIRVGV |
| | | | | TRFSRCV/LSPLSLTQKGNSLTPCASQAR |
| | | | | QCLALLRLAHGARTH |
| 665 | A | 3 | 377 | GRVRLL/NNWDVCANMFGTFFDTEDPG |
| | | | | EFKMKYWGVTSFLQKGNDDHWIVDTD |
| | | | | YDTYAGQYSCRLLNLDGTCADSYSFVFS |
| | | | | RDPNGLPPEAQKIVRQRQEELCLARQYR |
| | | | | LIVHNGYCDGRSKRNLL |
| 666 | A | 355 | 250 | QAGLELLTSDDLPASASKSAGTTGVSHR |
| | | | | ARPTLVF |
| 667 | A | 2 | 118 | GNVLPVLYGEMRVGSRVVSQEISTADEG |
| | | | | DGGQVVVIGR |
| 668 | A | 3 | 339 | TEQKSKSKQHRVSRRAQQRAESPESSAI |
| | | | | ESTQSTPQKGRGRPSKTPSPSQPKKNVR |
| | | | | VGRSKQAATKENDSSEEVNVFQGSSPVD |
| | | | | DIPQEETEEEEVSTVNVRRRSAKRERR |
| 669 | A | 2 | 120 | NYRRRPRPPNAPSQDGKEAKAGEAPTEN |
| | | | | PAPPTQQSSAE |
| 670 | A | 2 | 120 | NYRRRPRPPNAPSQDGKEAKAGEAPTEN |
| | | | | PAPPTQQSSAE |
| 671 | A | 3 | 284 | KTENDHINLKVAGQDGSLVQFKIKRRTP |
| | | | | LSKLMKAYCERQGLSMRHITLRFDGQSI |
| | | | | NETDTPAQLEMEDEDTIDVFQQQTESVP |
| | | | | DSILAGHSF |
| 672 | A | 2 | 439 | ERVLENVEHYQELKKMVQQSDLGQYVT |
| | | | | FLRSFSDKQKISLLHSCTCVLYTPSNEHF |
| | | | | GIVPLEAMYMQCPVIAVNSGGPLESIDH |
| | | | | SVTGFLCEPDPVHFSEAIEKFIREPSLKAT |
| | | | | MGLAGRARVKEKFSPEAFTEQLYRYVT |
| | | | | KLAG |
| 673 | A | 1 | 631 | KADFMRPRISFVDRCYIFSMLDNEVGAN |
| | | | | PRGGHQCGSALSCDEGVPAAQGASSEKP |
| | | | | HECTKCGKALCCRSDLRVHHGVHAGEK |
| | | | | SSACSERGSGFREKLCPDKQGTHTKEKP |
| | | | | ARDSRSGKTIFRKTRLCVPGTVHAGAKP |
| | | | | YKCWECEKTSHKSRLIEHLRSHTGEKPC |
| | | | | GCRECGKAFFQKSHLILRQRTHTGEKPC |
| | | | | GCAECGKAAPRTPAS |
| 674 | A | 3 | 242 | VWPLPCRDADAQSEGINASARYPKNWV |
| | | | | TTGDPAREFTMIHSAPLMLLADPDEFES |
| | | | | VQLAQSWPLGAIVSLWRSPCRKMN |
| 675 | A | 3 | 501 | RGININKKDVHTETPCKGHQHQRPKVD |
| | | | | KSMKMRKS*CKKAENSKNQNGSSPAKD |
| | | | | YNSSPAREQNWMENWLDKLTEVGFIRW |
| | | | | IITNSFKLKEHVLTQCKELRS/FEKKLEEL |
| | | | | LTKIISLEKTISV*GEG*IQILDRSL*RVCV |
| | | | | GYLRRSC |
| 676 | A | 1 | 405 | AAAAAADMERQEESLSARPALETEGLRF |
| | | | | LHTTEGSLLATYGWNIVFSCILLYVVFQ |
| | | | | KLSARLRALRHRQLDRAAAAVEPDVDV |
| | | | | KLQEALAAARLKMQEELNAQVEKHKE |
| | | | | KLKQLE*EKRRQTIEMWDSMQDGKSY |
| 677 | A | 588 | 3 | GGWLAFPLACPGRCHQPPAAYASAALL |
| | | | | NLGRPEAPAHPQTAGSVRPAAVPPGC*G |
| | | | | RTGGAGSPAGHSATGPAAPPPRGSTSSA |
| | | | | PPARQAEAGLESSSAQVIRPPRSSKVLGL |
| | | | | QA*ATAPGLPQLSEGDPGFPSGRVTWIG |
| | | | | QSPASEDSWRPSAVSSLTYSPVSPARGC |
| | | | | RSPS*KSGKT*KSRQPKRENPPGTAP |
| 678 | A | 98 | 314 | ILKAQATVGISINLDSPFTSPPLREEIMAN |
| | | | | NFSLESHNISLTEHSSMPVENNITLERPSN |
| | | | | VNLTCQFTTSGD |
| 679 | A | 386 | 545 | GNMKKQGISNFISYIYTHTHTHTHTHTYI |
| | | | | YIYIHIYTYTHTYNFFFLERELHS |
| 680 | A | 311 | 89 | RRPECVWGRRGPAGEESEQTALIPLPRG |
| | | | | LLTPPNWSGPPGLPPAASQPIILPGPGPSP |
| | | | | NLLKSSTSSERSRGAK |
| 681 | A | 860 | 84 | PWVLTMNFSGGGRQEAAGSRGRRAPRP |
| | | | | REQDRDVQLSKALSYALRHGALKLGLP |
| | | | | MGADGFVPLGTLLQLPQFRGFSAEDVQ |
| | | | | RVVDTNRKQRFALQLGDPSTGLLIRANQ |
| | | | | GHSLQVPKLELMPLETPQALPPMLVHGT |
| | | | | FWKHWPSILLKGLSCQGRTHIHLAPGLP |
| | | | | GDPGIISGMRSRCEIAVFIDGPLALADGIP |
| | | | | FFRSANGVILTPGNTDGFLLPKYFKEALQ |
| | | | | LRPTRKPLSLAGDEETECQSSPKHSSRER |
| | | | | RRIQQ |
| 682 | A | 420 | 22 | FDQPPGLKATRDEKDSLLNIARGKKNGE |
| | | | | KTRRVSSRKKPALKATSDEKDSFSNITR |
| | | | | GKKDGEISRKVSSQKPPTLKGTSDEEDS |
| | | | | VLGIARENKDGEKSRTVSSEKPPGLKAS |
| | | | | SDEKENVLNIARVYCVRCRGS |
| 683 | A | 1248 | 103 | EALHLAHFGLTGFTQTHCARAWGGQTR |
| | | | | KRRRVPRDPGGANCAGGGVSADTSGLA |
| | | | | AAARGPPTLGFRERRSARSLDRIRPILVL |
| | | | | MVDKKLVVVFGGTGAQGGSVARTLLE |
| | | | | DGTFKVRVVTRNPRKKAAKELRLQGAE |
| | | | | VVQGDQDDQVIMELALNGAYATFIVTN |
| | | | | YWESCSQEQEVKQGKLLADLARRLGLH |
| | | | | YVVYSGLENIKKLTAGRLAAAHFDGKG |
| | | | | EVEEYFRDIGVPMTSVRLPCYFENLLSHF |
| | | | | LPQKAPDGKSYLLSLPTGDVPMDGMSV |
| | | | | SDLGPVVLSLLKMPEKYVGQNIGLSTCR |
| | | | | HTAEEYAALLTKH\PARSCTMYR*LLRTT |
| | | | | KSLAFPVPGTW/LNMFRFYALRPDRDIEL |
| | | | | TLRLNPKALTLDQWLEQHKGDFNLL |
| 684 | A | 148 | 2357 | PNSMVVEHPEFLKAGKEPGLQIWRVEKF |
| | | | | DLVPVPTNLYGDFFTGDAYVILKTVQLR |
| | | | | NGNLQYDLHYWLGNECSQDESGAAAIF |
| | | | | TVQLDDYLNGRAVQHREVQGFESATFL |
| | | | | GYFKSGLKYKKGGVASGFKHVVPNEVV |
| | | | | VQRLFQVKGRRVVRATEVPVSWESFNN |
| | | | | GDCFILDLGNNIHQWCGSNSNRYERLKA |
| | | | | TQVSKGIRDNERSGRARVHVSEEGTEPE |
| | | | | AMLQVLGPKPALPAGTEDTAKEDAANR |
| | | | | KLAKLYKVSNGAGTMSVSLVADENPFA |
| | | | | QGALKSEDCFILDHGKDGKIFVWKGKQ |
| | | | | ANTEERKAALKTASDFITKMDYPKQTQ |
| | | | | VSVLPEGGETPLFKQFFKNWRDPDQTDG |
| | | | | LGLSYLSSHIANVERVPFDAATLHTSTA |
| | | | | MAAQHGMDDDGTGQKQIWRIEGSNKV |
| | | | | PVDPATYGQFYGGDSYIILYNYRHGGRQ |
| | | | | GQIIYNWQGAQSTQDEVAASAILTAQLD |
| | | | | EELGGTPVQSRVVQQKEPAHLMSLFGG |
| | | | | KPMIIYKGGTSRRGGQTAPASTRLFQVR |
| | | | | ANSAGATRAVEVLPKAGALNSNDAFVL |
| | | | | KTPSAAYLWVGTGASEAEKTGAQELLR |
| | | | | VLRAQPVQVAEGSEPDGFWEALGGKAA |
| | | | | YRTSPRLKDKKMDAHPPRLFACSNKIGR |
| | | | | FVIEEVPGELMQEDLATDDVMLLDTWD |
| | | | | QVFVWVGKDSQEEEKTEALTSAKRYIET |
| | | | | DPANRDRRTPITVVKQGFEPPSFVGWFL |
| | | | | GWDDDY\WSVGPLGTGPMAGAGLP |
| 685 | A | 361 | 570 | NCFLVFSPARSTVGEFASMSSEECI*MHV |
| | | | | VFLFPLTLCVVSL*ERQEAEKMFKGKRG |
| | | | | AQLAKDIARRSKT |
| 686 | A | 2484 | 1122 | QAQPMGRVGGMAQPMGRAGAPKPMG |
| | | | | RAGSARRGRFKGCWSEGSPVHPVPAVL |
| | | | | SWLLALLRCASTMLSLRVPLAPITDPQQ |
| | | | | LQLSPLKGLSLVDKENTPPALSGTRVLA |
| | | | | SKTARRIFQEPTEPKTKAAAPGVEDEPLL |
| | | | | RENPRRFVIFPIEYHDIWQMYKKAEASF |
| | | | | WTAEEVDLSKDIQHWESLKPEERYFISH |
| | | | | VLAFFAASDGIVNENLVERFSQEVQITEA |
| | | | | RCFYGFQIAMENIHSEMYSLLIDTYIKDP |
| | | | | KEREFLFNAIETMPCVKKKADWALRWI |
| | | | | GDKEATYGERVVAFAAVEGIFFSGSFASI |
| | | | | FWLKKRGLMPGLTFSNELISRDEGLHCD |
| | | | | FACLMFKHLVFLKPSEERVREIIINAVRIE |
| | | | | QEFLTEALPVKLIGMNCTLMKQYIEFVA |
| | | | | DRLMLELGFSKVFRVENPFDFMENISLE |
| | | | | GKTNFFEKRVGEYQRMGVMSSPTENSF |
| | | | | TLDADF |
| 687 | A | 25 | 219 | RNMAAATLTSKLYSLLFRRTSTFALTIIV |
| | | | | GVMFFERAFDQGADAIYDHVNEGKLW |
| | | | | KHIKHKYENK |
| 688 | A | 1 | 1034 | QWRNSSHRCLLLHPPLRRLPPALPPPPPP |
| | | | | CCCSKLLPPLGLKGFQMEHFDASLSTYF |
| | | | | KALLGPRDTRVKGWFLLDNYIPTFICSVI |
| | | | | YLLIVWLGPKYMRNKQPFSCRGILVVYN |
| | | | | LGLTLLSLYMFCELVTGVWEGKYNFFC |
| | | | | QGTRTAGESDMKIIRVLWWYYFSKLIEF |
| | | | | MDTFFFILRKNNHQITVLHVYHHASMLN |
| | | | | IWWFVMNWVPCGHSYFGATLNSFIHVL |
| | | | | MYSYYGLSSVPSMRPYLWWKKYITQGQ |
| | | | | LLQFVLTIIQTSCGVIWPCTFPLGWLYFQI |
| | | | | GYMISLIALFTNFYIQTYNKKGASRRKD |
| | | | | HLKDHQNGSMAAVNGHTNSFSPLENNV |
| | | | | KPRKLRKD |

[0459] TABLE 7

| SEQ ID | Position of end of signal | MaxS | MeanS |
|---|---|---|---|
| NO: | in amino acid sequence | (maximum score) | (mean score) |
| 1 | 29 | 0.962 | 0.801 |
| 5 | 17 | 0.989 | 0.926 |
| 15 | 33 | 0.933 | 0.780 |
| 20 | 39 | 0.899 | 0.608 |
| 23 | 18 | 0.992 | 0.867 |
| 25 | 32 | 0.928 | 0.768 |
| 26 | 37 | 0.979 | 0.808 |
| 27 | 48 | 0.977 | 0.661 |
| 28 | 18 | 0.965 | 0.805 |
| 29 | 16 | 0.972 | 0.860 |
| 30 | 21 | 0.948 | 0.785 |
| 31 | 23 | 0.954 | 0.824 |
| 32 | 18 | 0.966 | 0.896 |
| 33 | 15 | 0.989 | 0.956 |
| 39 | 16 | 0.988 | 0.971 |
| 61 | 37 | 0.979 | 0.808 |
| 62 | 21 | 0.990 | 0.901 |
| 73 | 48 | 0.977 | 0.661 |
| 86 | 18 | 0.965 | 0.805 |
| 87 | 16 | 0.949 | 0.749 |
| 88 | 16 | 0.949 | 0.749 |
| 89 | 16 | 0.949 | 0.749 |
| 91 | 16 | 0.972 | 0.860 |
| 102 | 21 | 0.948 | 0.785 |
| 103 | 19 | 0.893 | 0.604 |
| 104 | 28 | 0.945 | 0.556 |
| 106 | 17 | 0.965 | 0.869 |
| 107 | 16 | 0.980 | 0.957 |
| 108 | 22 | 0.969 | 0.917 |
| 115 | 23 | 0.954 | 0.824 |
| 126 | 18 | 0.966 | 0.896 |
| 138 | 38 | 0.901 | 0.607 |
| 139 | 33 | 0.976 | 0.754 |
| 140 | 27 | 0.966 | 0.909 |
| 147 | 38 | 0.901 | 0.607 |
| 149 | 22 | 0.929 | 0.838 |
| 162 | 32 | 0.949 | 0.704 |
| 168 | 27 | 0.966 | 0.909 |
| 171 | 42 | 0.895 | 0.609 |

1. An isolated polynucleotide comprising a nucleotide sequence selected from the group consisting of SEQ ID NO: 1-172, or 345-516, a mature protein coding portion of SEQ ID NO: 1-172, or 345-516, an active domain coding portion of SEQ ID NO: 1-172, or 345-516, and complementary sequences thereof.

2. An isolated polynucleotide encoding a polypeptide with biological activity, wherein said polynucleotide hybridizes to the polynucleotide of claim 1 under stringent hybridization conditions.

3. An isolated polynucleotide encoding a polypeptide with biological activity, wherein said polynucleotide has greater than about 90% sequence identity with the polynucleotide of claim 1.

4. The polynucleotide of claim 1 wherein said polynucleotide is DNA.

5. An isolated polynucleotide of claim 1 wherein said polynucleotide comprises the complementary sequences.

6. A vector comprising the polynucleotide of claim 1.

7. An expression vector comprising the polynucleotide of claim 1.

8. A host cell genetically engineered to comprise the polynucleotide of claim 1.

9. A host cell genetically engineered to comprise the polynucleotide of claim 1 operatively associated with a regulatory sequence that modulates expression of the polynucleotide in the host cell.

10. An isolated polypeptide, wherein the polypeptide is selected from the group consisting of:
(a) a polypeptide encoded by any one of the polynucleotides of claim 1; and
(b) a polypeptide encoded by a polynucleotide hybridizing under stringent conditions with any one of SEQ ID NO: 1-172, or 345-516.

11. A composition comprising the polypeptide of claim 10 and a carrier.

12. An antibody directed against the polypeptide of claim 10.

13. A method for detecting the polynucleotide of claim 1 in a sample, comprising:
a) contacting the sample with a compound that binds to and forms a complex with the polynucleotide of claim 1 for a period sufficient to form the complex; and
b) detecting the complex, so that if a complex is detected, the polynucleotide of claim 1 is detected.

14. A method for detecting the polynucleotide of claim 1 in a sample, comprising:
a) contacting the sample under stringent hybridization conditions with nucleic acid primers that anneal to the polynucleotide of claim 1 under such conditions;
b) amplifying a product comprising at least a portion of the polynucleotide of claim 1; and
c) detecting said product and thereby the polynucleotide of claim 1 in the sample.

15. The method of claim 14, wherein the polynucleotide is an RNA molecule and the method further comprises reverse transcribing an annealed RNA molecule into a cDNA polynucleotide.

16. A method for detecting the polypeptide of claim 10 in a sample, comprising:
a) contacting the sample with a compound that binds to and forms a complex with the polypeptide under conditions and for a period sufficient to form the complex; and
b) detecting formation of the complex, so that if a complex formation is detected, the polypeptide of claim 10 is detected.

17. A method for identifying a compound that binds to the polypeptide of claim 10, comprising:
a) contacting the compound with the polypeptide of claim 10 under conditions sufficient to form a polypeptide/compound complex; and
b) detecting the complex, so that if the polypeptide/compound complex is detected, a compound that binds to the polypeptide of claim 10 is identified.

18. A method for identifying a compound that binds to the polypeptide of claim 10, comprising:
a) contacting the compound with the polypeptide of claim 10, in a cell, under conditions sufficient to form a polypeptide/compound complex, wherein the complex drives expression of a reporter gene sequence in the cell; and
b) detecting the complex by detecting reporter gene sequence expression, so that if the polypeptide/compound complex is detected, a compound that binds to the polypeptide of claim 10 is identified.

19. A method of producing the polypeptide of claim 10, comprising,
a) culturing a host cell comprising a polynucleotide sequence selected from SEQ ID NO: 1-172, or 345-516, a mature protein coding portion of SEQ ID NO: 1-172, or 345-516, an active domain coding portion of SEQ ID NO: 1-172, or 345-516, complementary sequences thereof and a polynucleotide sequence hybridizing under stringent conditions to SEQ ID NO: 1-172, or 345-516, under conditions sufficient to express the polypeptide in said cell; and
b) isolating the polypeptide from the cell culture or cells of step (a).

20. An isolated polypeptide comprising an amino acid sequence selected from the group consisting of any one of the polypeptides SEQ ID NO: 173-344, or 517-688, the mature protein portion thereof, or the active domain thereof.

21. The polypeptide of claim 20 wherein the polypeptide is provided on a polypeptide array.

22. A collection of polynucleotides, wherein the collection comprising the sequence information of at least one of SEQ ID NO: 1-172, or 345-516.

23. The collection of claim 22, wherein the collection is provided on a nucleic acid array.

24. The collection of claim 23, wherein the array detects full-matches to any one of the polynucleotides in the collection.

25. The collection of claim 23, wherein the array detects mismatches to any one of the polynucleotides in the collection.

26. The collection of claim 22, wherein the collection is provided in a computer-readable format.

27. A method of treatment comprising administering to a mammalian subject in need thereof a therapeutic amount of a composition comprising a polypeptide of claim 10 or 20 and a pharmaceutically acceptable carrier.

28. A method of treatment comprising administering to a mammalian subject in need thereof a therapeutic amount of a composition comprising an antibody that specifically binds to a polypeptide of claim 10 or 20 and a pharmaceutically acceptable carrier.

The application's sequence listing, which the Patent Office published only in electronic form, follows.

SEQUENCE LISTING (688 sequences)

SEQ ID NO: 1 - DNA, 1049 bp, Homo sapiens
  CDS (47)..(727)
tcactaggccagtgacgtggaaatcgcgcttaggggctgaggcgcgatggcaggtgtcggggctgggcctctgcgggcgatggggcggcaggccctgctgcttctcgcgctgtgcgccacaggcgcccaggggctctacttccacatcggcgagaccgagaagcgctgtttcatcgaggaaatccccgacgagaccatggtcatcggcaactatcgtacccagatgtgggataagcagaaggaggtcttcctgccctcgacccctggcctgggcatgcacgtggaagtgaaggaccccgacggcaaggtggtgctgtcccggcagtacggctcggagggccgcttcacgttcacctcccacacgcccggtgaccatcaaatctgtctgcactccaattctaccaggatggctctcttcgctggtggcaaactgcgtgtgcatctcgacatccaggttggggagcatgccaacaactaccctgagattgctgcaaaagataagctgacggagctacagctccgcgcccgccagttgcttgatcaggtggaacagattcagaaggagcaggattaccaaaggtatcgtgaagagcgcttccgactgacgagcgagagcaccaaccagagggtcctatggtggtccattgctcagactgtcatcctcatcctcactggcatctggcagatgcgtcacctcaagagcttctttgaggccaagaagctggtgtagtgccctctttgtatgacccttcctttttacctcatttatttggtactttccccacacagtcctttatccacctggatttttagggaaaaaaatgaaaaagaataagtcacattggttccatggccacaaaccattcagatcagccacttgctgaccctggttcttaaggacacatgacattagtccaatctttcaaaatcttgtcttagggcttgtgaggaatcagaactaacccaggactcagtcctgcttcttttgcctcgagtgattttcctctgtttttcactaaataagcaaatgaaaactcaaaaaaaaaaaa

SEQ ID NO: 2 - DNA, 2582 bp, Homo sapiens
  CDS (1)..(1569)
atggtggcaggagagagtgagaagggggaggcccaggagctattaaaaaccagactgaaccaagggtcaggtcccacactgggcacccaagctgccatttttaagactgccatgccactgaaccacagagaagacaggagccaagaggctataatcacgtgctccgaagacttccgggtttccaacgtgacttccggttgtcagaatttacccctgacgcggcggcggccgacgggaagctgtgtgtgcttaggtcgtggtggccccggtggtggtgggctccgggcgggctcgcgtcatcctgcccccgctgcgatgcatccgcggcgcccggacggatttgatggcttgggctaccggggtggtgcccgggacgagcagggctttggcggcgccttccctgcaaggtccttcagcaccgggtcggacctgggccactgggtgacgactcccccagatatccccggcagccgcaacctgcactggggcgagaagagcccgccctacggcgtgcccaccacctccaccccgtacgaaggccccacggaggaacccttttccagtggcggcggcggcagtgtgcaggggcagagcagtgaacagctgaatagatttgctggatttggtattggacttgcaagtctctttacagaaaatgtattggcacatccttgcattgttctacgccgccaatgtcaggttaattaccatgctcagcattaccatctcactccatttacagtcatcaatattatgtacagtttcaacaaaactcagggacctagagccctgtggaaaggaatgggaagtacatttattgtccagggagtcacacttggagcagaaggcataattagtgaatttacacctttgccaagggaggttttacataaatggagtcctaaacaaataggagaacaccttctactgaaatccctaacttacgtggtggcaatgcctttttattcagcaagtctgattgaaacagtgcagagtgagataattcgagataatactggcattttggagtgtgttaaagaaggaattggaagagtgataggcatgggagtgcctcatagcaaacgacttcttccgcttctttccttgatcttccctacggtgcttcatggagttcttcattacatcatcagctcagttattcagaagtttgtcctactaattctaaagagaaagacttacaatagccacctagctgagagcactagccctgtgcagagtatgttggatgcttattttccagaacttattgctaactttgctgccagtctttgttctgacgttatactttacccattggaaacagttttgcaccgccttcacattcaaggaacacgcacaataattgacaatacagaccttggctatgaagtgcttccaattaatacacaatatgagggaatgagagactgtatcaataccataaggcaggaggaaggagtgtttggtttttataaagggtttggtgctgttataatacagtacacactgcatgcagctgttttacagattaccaaaattatttactctacacttcttcaaaataacatttgagatttaggttccttcactgagtagtctggaagatataatctggataatttgctatgaagttatgagggataaaagtgaaatactggggaagaaaatggattggaaagtaaaattggtactaaagcccatactgattatcttgactttgttttttaaggcataggtatatattttggatcaaaatccttccaaatttgaaaactcaataaaaataacacttattaaattctagttagtgtagcactcatgctgaagtaaacatgatcgtaggcagaagcaaaattttattataaaatctaaaacaaaactttatagagttgaatctattccatctgacttcaatatttgccaaacgtttattttacctcctagattgatgttggtatagtatccttaatacagtgtagtatattaatgtccttaatacaatcaggaggtttttacctttaagcaaataaattatgtcattattgaaaaagacttaagggatgattagacttggcaatctgtaagcaggagtataaatgttttaaattgcattgtccctatgtaactatcttaatggctatatatatgtattttataaagccatttatgtatacacatgtaacttggaatttccttcatccctacacattttctacacttacatcaccttattgcataaaacaaagtcacgcgctttctgcttgaacatcaaaatatcaaaaaccaaggtacccaaaagatacaagtcagagacaacatccttgtccatatccaaacccagtgtttcagtgctagcaacttaatttctcatacatttatagagtttggtttgctttgctagttgtgtgaatcattgggctgtttttagagccactgttaagagagaatataaaataatcatgacaattactactgtttccacatttacaaattgtgtacttaaatgaacctcatttcccttttatttctgaatggcttgtctgagaggaaacaaaattaaaattcatctgggaaaaaaaaaa

SEQ ID NO: 3 - DNA, 3232 bp, Homo sapiens
  CDS (216)..(1655)
ggcacgagcccggctctggcgtccctggctgccaagcctgaggcccgcagtcctactcccgccgagacccgccgctccggtcctgccccgaactgcccacggccggcagcgcttccaggccctgaaaaaaactctcttcctgtgtctggccagaggtatagagagagacaggttcaactctaaggcctgaaaaggaacaaggcccaccggaagcaatggccactgtccctggcctccagcccctgccaaccttggagcaggacctggaacaggaagagatcctgattgtgaaggtggaggaggacttctgcttggaagaggagccctccgtggagacggaggaccccagccctgagactttccgccagctcttccggctcttctgctaccaggaggtggctgggccccgggaggccctgagccgcctctgggagctgtgctgccgctggctgcggccggagctgcgcaccaaggagcagatcctggagctgctggtgctggagcagttcctgactgtgctgccgggggagatccaggctcgggtacgcgagcagcagccggagagcggtgaggaggccgtggtcctcgtggaagggctgcagcggaagcccaggaaacacaggcagcggggctcagagctgctttctgatgacgaggtgcccctcgggatagggggacagttcttaaaacaccaggcagaggctcagccagaggatctgtccctggaggaagaggctcgattctccagccagcagcccccagcccagctgagccacaggccacagaggggcccgctgttgtggccagagagaggccctccagctccccggcatcaggagatggcgtcagcctcgcccttcctttcggcctggtcccaggtgcccgtgaacttggaggacgtggctgtatacctttctggggaggagccaagatgcatggacccagctcagcgggacgcgccgctggagaatgaaggacctgggatccagttggaggacggcggtgatggcagggaggatgccccgttgagaatggagtggtaccgagtgctctcggcacgatgccaggggcctggccacccgctcccaggtcagaggccagccccagtcaggggcttggtcaggcctgatcagccaagaggcggccccccaccaggaagacgggcttcccatggggctgacaagccgtacacctgccccgaatgtggcaaaggcttcagcaagacgtcccacttgaccaagcaccagcgcacacacacgggcgagcggccttacaagtgcctagtctgtgggaagggctttagcgaccgctccaacttcagcacgcaccagagggtgcacacaggcgagaagccctacccgtgccccgagtgtgggaagcgcttcagccagagctccagcctggtcatccaccgcaggacacacagcggggagcggccctatgcctgcacccagtgcgggaagcgcttcaacaacagctcgcacttcagcgcccaccgccggacgcacacaggtgagaagccctacacctgcccggcctgtggccggggcttccgccggggcaccgacctgcacaagcaccagcggacccacatgggggcaggctccttgccgacgctccagccggtggctcctggaggccccggtgcaaaagcctgatcaccatgcctgaaactccctttccaggactctcatccctgggcacagaattcaggaaactgctagacagcctggtccgaaagcattgccagctgcccgtttcctcccatggcccagtatgaggccagcaggggacatttgggatgcccaggccgcagaggaagctgggcactgggtgcagaacaagggcaaggacaggctctgagtgtccagtggcagccagaacaggtgacacagagcaggggcttcagccacagagacacactcaggaggccagaagccgacactcaaggtgttcgtggggctggctcctgaagggcctgggagggtccatcagctgcctccagcatccagtggctgctggcatacagcctcatccccacgtcccaacccctctcctgtgtgtctgtgaccctgtgcgctgtctctgtgtgtaccccccacctgctcccccccccttttttttttgagacggggccttgctgtgtcccccaggcgggagtgcagtgccatgatcatagctcactgcagccttgaatccctgggctcaagtgttcctcctgcctcgtcctcctgagtagctggggttacaggtgtgtgccgccatgcccagtctcttttttggtagggccaccactcactgggtttagggttccccaatacactgtgacctcatcttaactaattatatcatcaaaacccgtgtttccaaataaggtcacattctgaggtctgggtgcacatgaatttgagggacccctcgtctgctgcagggagccctgctgtaccccagccttcccaggacgtggtctccagcttcttcatcctgccagagattccaaatggagcccggggctctgcagcattccagtcccctttgcagatccatagctgctctgcagggcggaagacacctggggcgggaaagcacccctgagttccatcttcctgacatgtcgcctgggatgtgacgggcctgacatctccccagggccggggcccagggctgcctttgctcctggccccttagtgtctggaatgtggccttccacggttgccccactttgtctttctaaggtaagaagccttcaccttccagcttttgtctggcctgtgctgcgtgggagccactggtctgtgcacatccacggtgggtgagtggccaagacaagcagtgtgatagagtccttggtgggtttagtcatctcggaagtcgtagggcagctatggaaaccactgggttctggaacgttccagccaggcagtggttgttcctcataggtaggtggccttggccttcatcccagcctgggatgctccattgcatttgtcacctagtcactgtatatacgtgcacatttgaccttttggcacagcccaggttccaggtgcgtgacctgccctttttctcattcccttaactgacattatttagtgtcagaggccgagcacagtggctcccacctataatcctagcactttgggaggccaacgcgggtggattgcttgagcccaggagttcaagagcagcctgggcaatatagaaagacctcttccctaccaaaaaaaaaaaa

SEQ ID NO: 4 - DNA, 5462 bp, Homo sapiens
  CDS (1)..(5460)
atgcacgggaaagaccagaggttggtacggagccagcacgttgaaggatgttgtaagaggatcggctttgatggtggctctcaattggtcatcgtcaacttcccatggcctgccattatgctcctcatcttcttcattatgctcctcatcttctttgcaaaaccttttgaaccaccactgtgcctgagcatgcccaccagtgagaccgagtccgtcaacaccgaaaacgtggctggaggtgacatcgagggagaaaactgcggggccaggctggcagacagcgaggttagggccctgagtcctgctggccaccctttccattctgataaatgtgacctgggagagaagcagccagaagagtgtgagaagtcactgaagggcattcagaacagagctgagtgggaggttgatttggttagttctgagctcctgaaggatcactgcgacgtcaggaaaagagcagggaggaatgagaagctgcaagagcctgacacagccttctctccctcctcgctcttcttcaagaatccgctcaacctgagccaccggatctccaagtcaaagttcagccgctactggcgccggtggaatcggttctgcagaaggaagtgccgcgccgcagtcaagtctaatgtcttctactggctggtgattttcctggtgttcctcaacacgctcaccattgcctctgagcactacaaccagcccaactggctcacagaagtccaagacacggcaaacaaggccctgctggccctgttcacggcagagatgctcctgaagatgtacagcctgggcctgcaggcctacttcgtgtccctcttcaaccgctttgactgcttcgtcgtgtgtggcggcatcctggagaccatcctggtggagaccaagatcatgtccccactgggcatctccgtgctcagatgcgtccggctgctgaggattttcaagatcacgaggtactggaactccttgagcaacctggtggcatccttgctgaactctgtgcgctccatcgcctccctgctccttctcctcttcctcttcatcatcatcttctccctcctggggatgcagctctttggaggaaagttcaactttgatgagatgcagacccggaggagcacattcgataacttcccccagtccctcctcactgtgtttcagatcctgaccggggaggactggaattcggtgatgtatgatgggatcatggcttatggcggcccctcttttccagggatgttagtctgtatttacttcatcatcctcttcatctgtggaaactgtatcctttgctgctgccccccacccctgcggcccccagcccccagcctgcagcacagtgccaaacgggcacgcccctcagaatggacacaaacagatatcctactgaatgtgttcttggccattgctgtggacaacctggctgatgctgagagcctcacatctgcccaaaaggaggaggaagaggagaaggagagaaagaagctggccaggactgccagcccagagaagaaacaagagttggtggagaagccggcagtgggggaatccaaggaggagaagattgagctgaaatccatcacggctgacggagagtctccacccgccaccaagatcaacatggatgacctccagcccaatgaaaatgaggataagagcccctaccccaacccagaaactacaggagaagaggatgaggaggagccagagatgcctgtcggccctcgcccacgaccactctctgagcttcaccttaaggaaaaggcagtgcccatgccagaagccagcgcgtttttcatcttcagctctaacaacaggtttcgcctccagtgccaccgcattgtcaatgacacgatcttcaccaacctgatcctcttcttcattctgctcagcagcatttccctggctgctgaggacccggtccagcacacctccttcaggaaccatattctgttttattttgatattgtttttaccaccattttcaccattgaaattgctctgaagatcctaggcaatgcagactatgtcttcactagtatctttacattagaaattatccttaaggacactcaggtgcccccagctgccatccctggatggaaacaccccagcaagggccccttcccaagtaatggtgtagaattaggaaagcaggaccgaggtggctggcaatcagaaaaaaagggtcaaagaggaacaattagcactgggtacctgagtctggcttttcctgatgccctgaacaccacagatgactttcaaatgactgcttatggggctttcttgcacaagggttctttctgccggaactacttcaacatcctggacctgctggtggtcagcgtgtccctcatctcctttggcatccagtccagtgcaatcaatgtcgtgaagatcttgcgagtcctgcgagtactcaggcccctgagggccatcaacagggccaaggggctaaagcatgtggttcagtgtgtgtttgtcgccatccggaccatcgggaacatcgtgattgtcaccaccctgctgcagttcatgtttgcctgcatcggggtccagctcttcaagggaaagctgtacacctgttcagacagttccaagcagacagaggcggaatgcaagggcaactacatcacgtacaaagacggggaggttgaccaccccatcatccaaccccgcagctgggagaacagcaagtttgactttgacaatgttctggcagccatgatggccctcttcaccgtctccaccttcgaagggtggccagacatgagccacgatgtcagagatctctgtcattacccttatggcatctgggagttgggtgtggggagagcttctccaggtgtgggccctgtggtcaccataggattcaagattgccactcccagcatgcccttcattgggctgctgtaccgctccatcgactcccacacggaagacaagggccccatctacaactaccgtgtggagatctccatcttcttcatcatctacatcatcatcatcgccttcttcatgatgaacatcttcgtgggcttcgtcatcgtcacctttcaggagcagggggagcaggagtacaagaactgtgagctggacaagaaccagcgacagtgcgtggaatacgccctcaaggcccggcccctgcggaggtacatccccaagaaccagcaccagtacaaagtgtggtacgtggtcaactccacctacttcgagtacctgatgttcgtcctcatcctgctcaacaccatctgcctggccatgcagcactacggccagagctgcctgttcaaaatcgccatgaacatcctcaacatgctcttcactggcctcttcaccgtggagatgatcctgaagctcattgccttcaaacccaaggaaagaggaaatgaaggcagtgaagccttggccttgtctgcttctcagagagtagagaggcagaaagaggagcggtttctccggtcccccacctgttgtcctgaggaatccatcaacgaggccctgggcacttcctttatcgagatagttcttgagcgcctcagtgatgatgttgaagcatggtaccatctttatagggctcacagagtagtgcgggagacaccaatacacaacaaacaaaggtttcagatggggagcttgtcactctctggggtggtctgccggaagagaaagcagagatggaaggcaaagacagtggctccggagccgccatccgtgccgtgctcagcaggacttagcagcatggccacccagcccgccctgcgtggctctgaggagctggacagtagaggtttggtttgccacttcaaggagagccaggaaaaccctttctccaaccccttacttctcaaccatttgggacacagtcaccagagaaataaggggcaacagggttactttagtgatccctggaatgtttttgacttcctcatcgtaattggcagcataattgacgtcattctcagtgagactaatctctgcccggcgctgccgggctggggcgtggagctgagcagagggagtggcggtgcaggggacacaccgcccggctccccggggcggccacagccccacgccacctttgaactaacccagcttttgtcaggcctctgcaccctgcgaaaaccaggttatccaggtttgagctgccagaactgtagagtgcactatttctgtgatgcatggaatacatttgacgccttgattgttgtgggtagcattgttgatatagcaatcaccgaggtaaacatggtacccaaagccccggcactagagaagaagaagcgacaagaggcagaggagcggagaggcctgggccagggcctctggcgcgaggagatcgggacccgcaaacttctgttcatctgggagatgccgctgaacaactgccaggtgtcacaagaggaccgtcttcaggccccctcaaagaccacagatgggagaaactacaaactaactcagggcaccggcagcaaatctgggaaggggtcagagattaatggcccaagtattgatggctaccaacaaattctgaatttacatccaaagaacgcagaggaaaactcccgcatctccatcaccttcttccgcctgttccgggtcatgcgtctggtgaagctgctgagccgtggggagggcatccggacgctgctgtggaccttcatcaagtccttccaggccctgccctatgtggccctcctgatcgtgatgctgttcttcatctacgcggtgatcgggatgcaggtgtttgggaaaattgccctgaatgataccacagagatcaaccggaacaacaactttcagaccttcccccaggccgtgctgctcctcttcaggtgtgccaccggggaggcctggcaggacatcatgctggcctgcatgccaggcaagaagtgtgccccagagtccgagcccagcaacagcacggagggtgaaacaccctgtggtagcagctttgctgtcttctacttcatcagcttctacatgctctgtgccttcctgatcatcaacctctttgtagctgtcatcatggacaactttgactacctgacaagggactggtccatccttggtccccaccacctggatgagtttaaaagaatctgggcagagtatgaccctgaagccaagggtcgtatcaaacacctggatgtggtgaccctcctccggcggattcagccgccactaggttttgggaagctgtgccctcaccgcgtggcttgcaaacgcctggtctccatgaacatgcctctgaacagcgacgggacagtcatgttcaatgccaccctgtttgccctggtcaggacggccctgaggatcaaaacagaagctttccatgaaactctgggactcattctgggtggtatcttgaagtcagagggtatagctcacaaaacagaaggagacgggtgttacctgaagcaggaccaacccctgtctaaaagaacttacactggcta

SEQ ID NO: 5 - DNA, 1278 bp, Homo sapiens
  CDS (802)..(1056)
tgtgtttttaatccttatgtctttttggcagctcagaaggaccagctccaggtaaacaatacccagttgacctgtaaatcttgccagttatatcactgcattaatcatagcacattgcgaacacataatatctcgactttgatgattttaggttgcatccctgggctagggattcctgttaatctgtccgaggcttgggctgccacacctgctttgcattttgtgaaacttcttctacttcaggttactcattgtgcccgtagagccttaggcatgataatttttgctatcgtttccttggtcacactaataacttctgttgtgatgtcctctgtaactttgcatagttctgttcaaacggctcagtacgtagagaattggacacgtacagccaaccaagcgaggctacttcagaataaaattaacactgagttacaaactgaagtggcaatgttgaaatccatggttctgtggttaggggaacaagtataaagcttgcagttgcagcggcaattgcgctgtcattttaatcacactcgtatttgtgtaaccaacttagaatataacaaaagtgagtatccgtgggaccttgtgaaagcccatttgcaaggagctttcacatccaacatcacctttgatattagtgaattacaaaacaaaattcttgatttaaataggcacactcaagaatttcagccttctttagaagactggactgaattccaggaaggcctggagagcctcaacccttggacctatctaaagtaccacagtaacatcttatatgtagttcttggagtaatgttgttttgtctctgtcttctgtttatagtctgtaaaatcggatggaccgccaatcggagaatgagagctgcccagcctggtcttacattctttcaattaattcataaacagggggatatgcagggagccgaaggcccatgggacgtgaccaactcagcattcctctggaggctatatgatcaaacagcaaactgtttatcaagaatgcaggatatgggcaaactcacacttccctgccaccaaaaggtttgctgagggacatgtctcccttgcaccgggctccttgaagttatctaatgagaaatctagcacctattattcaaaggatgcagtcttgcaagcctgctgtgaaccaaacggctgactgacaattacctgacaatcaccctgcctttctcgctctctcttttgcctaataaatatggagggctgtgtaaagctcaaaacccttgtcccctagaggcaaaaaaaaaa

SEQ ID NO: 6 - DNA, 2019 bp, Homo sapiens
  CDS (140)..(628)
cctggtggcgaattcggcacgaggcgccgcgccgcgctgcgacgctgtagtggcttcgtcttcggtttttctcttccttcgctaacgcctcccggctctcgtcagcctcccgccggccgtctccttaacaccgaacaccatgccttcaattaagttgcagagttctgatggagagatatttgaagttgatgtggaaattgccaaacaatctgtgactattaagaccatgttggaagatttgggaatggatgatgaaggagatgatgacccagttcctctaccaaatgtgaatgcagcaatattaaaaaaggtcattcagtggtgcacccaccacaaggatgaccctcctcctcctgaagatgatgagaacaaagaaaagcgaacagatgatatccctgtttgggaccaagaattcctgaaagttgaccaaggaacactttttgaactcattctggctgcaaactacttagacatcaaaggtttgcttgatgttacatgcaagactgttgccaatatgatcaaggggaaaactcctgaggagattcgcaagaccttcaatatcaaaaatgactttactgaagaggaggaagcccaggtacgcaaagagaaccagtggtgtgaagagaagtgaaatgttgtgcctgacactgtaacactgtaaggattgttccaaatactagttgcactgctctgtttataattgttaatattagacaaacagtagacaaatgcagcagcaagtcaattgtattagcagaatattgtcctcattgcatgtgtagtttgagcacagatcccaaaccttacggccaagtttcttctagtatgatggaaagtttcttttttctttgctctgaataaaactgaactgtgggttctctataagtggcattttgggctttcctcccttttttgtaaagcaatgtctgcctagtttattgtccaagttaactttaggtgaccttttaaaagttggcattgaaaataaaacaacttgcaaaaaagttttctggaatagaattaacaaaatattatctttatcatgagttggaaactggaaaaaggcttcttgaagtaaatgttctgagtggagctactaggatgtcttccagcctcctgcagtcaaggagtaccactgtattgattagcctgtatgtagcagggctcccttcattgcatctgaggacttggtttctttttctttatttttaatcctcttagttttaaatatattgcctagagactcagttactacccagtttgtggttttttgggagaaatgtaactggacagttagcttttcaattaaaaagacacttaacccatgtgggatgtcatctttttataattagtgttcccatgtggagaaaattattcacactacttgcatgtaaagaataatttaacttttaacattaaaatatgtggtaaaacccagaaagcatccatcatgaatgcaagatactttcaataaaaagtaagttatatagtaggtagttaagtttgcttttgtggacttaaatgtgtctcttcacttaaatgggttgaatgtgtatatatttgttcagcttgaaaagacttagtttatatcctagctcactggaggctgctgacataaccataacttctgtcccttctaattgtcatttatatgcctaactggagctagtactttaattcttaacacaaaattactctgccattgtttccagcttccctcctacaatagaatgaagtttttttgatggcttgagatggctcacaaattttgatttttttttcttccttgtgctccctttttttctccttgcttttccagttaacatctatattcacatgtaatcttgttttctcttcacattcactgagttgttcaggctcagatcatcccttgacagtagtttgccttcatctcacctttcatttgtcccaaattcaccttatttaataaagtcccatatgttgtctcacttaattccaatttgttgtctgtaccagagataggaaactataatgtgg

SEQ ID NO: 7 - DNA, 1717 bp, Homo sapiens
  CDS (75)..(524)
cacgcgtccgctggagcggcgcagccggagtggggccgtgaggagaataaaggcagccccgttgatgactgaaaatgacaaagcatccacctaacagacgaggaatcagctttgaagtgggagcccagttggaagcccgggaccgtttaaaaaactggtatccagctcacatagaagacattgactacgaggaaggaaaagtactcatccatttcaagcgttggaaccatcgttatgatgagtggttctgctgggacagtccttatttacgccctttagagaaaatacagctgaggaaagagggcttgcatgaagaggatggatcttctgaatttcaaataaatgagcaggtccttgcttgctggtctgattgtcgtttttacccggccaaagtcactgctgttaacaaggatggtacttacactgtgaaattttatgatggagtagttcagactgtcaaacatattcatgtcaaagctttttccaaagatcaggtgagaaatgtggttttgtgctttgtgttatgaataatgctaacattgtagttttgcctcctcaaataaagacattacattagttagagaaaagcaacagtgaatgtgaagaaagacaaagaatgataaacccttaaagacagaaaagcgacccaagcagcctgataaagaaggaaagttaatctgttctgaaaaggggaaagtgtcagagaaaagtcttcccaagaaccgagaaggaagacaaggaaaaccatttccgaaaatgacagagagtattctggagatgcccaagtggataagaaacctgaaaatgacattgtgaagagtccacaagaaaacttgagggaacccaaaagaaaacgaggcagacccccttccatagctcctactgctgtggattcaaactctcaaactttgcaaccaataacattggaactgagaagaaggaaaatatcaaaaggatgtgaagtcccattaaaacgtcctcggcttgacaaaaattcatcccaggaaaagtcaaaaaactactcggaaaacactgacaaagacttatcgaggagacgttcctccaggctgtccactaatgggacccatgagatcctagatcctgacttggttgtatcagatttggttgatacggatcctttgcaagacacgttgtctagtaccaaggaatctgaagaaggtcagttgaagtctgctttggaagctggccaggtctcatctgcactgacttgccactcctttggggatggatccggggctgcaggcttggagttgaactgcccatcaatgggagaaaacacgatgaaaacagaaccgacttctccccttgtggaattacaagagatttcgactgtggaagtaacaaatacttttaagaaaacagatgattttgggtcatctaatgcaccagctgtcgacctagaccataagtttagatgcaaagttgtggactgtttaaaatttttccgcaaagccaaactgttgcactatcacatgaagtatttccatggaatggagaagtcactggagccagaagagagcccgggaaagaggcatgtccaaaccaggggcccttcagcttcagacaagcccagccaggagaccctgaccaggaagcgggtctctgccagttccccaactacaaaagacaaggaaaagaataaagagaagaaattcaaggagtttgtgagagtgaagccaaagaagaaaaaaaaaaa

SEQ ID NO: 8 - DNA, 4613 bp, Homo sapiens
  CDS (124)..(1311)
cggaattcccgggtcgacgatttcgtcccccctccgcgactgcggataatgagcgcctcgggccgcccagcgcagccggagtatccacctcgatgaccacgggctgagccccgcgccgccaccatgtccgtggccttcgcgtctgcccggccaagaggcaaaggggaggttacgcagcaaaccatccagaagatgctggacgagaaccaccacctgatccagtgcatcctggagtaccagagcaagggcaagacggccgagtgcacgcagtaccagcagatcctgcaccggaacctggtatacctggccacgatcgcagactccaaccagaacatgcagtccctgcttcctgccccgcccacgcagaacatgaacctgggccctggagccctgactcagagcggctccagccagggcctgcactctcagggcagcctgagtgacgccatcagcacgggcctgccaccctcctccctcctgcagggccagattggcaacgggccgagccacgtgtccatgcagcagacggcgcctaacacgctgcccaccacctccatgagcatctctgggcccggctacagccacgcgggacccgcctcgcagggcgtccccatgcaggggcaaggcaccatcggcaactacgtgtctcggaccaacatcaacatgcagtccaacccagtctccatgatgcagcagcaggcggccacgtcgcactacagctcggcgcagggcggcagccagcactaccagggccagtcgtccatcgccatgatggggcagggcagccaggggagcagcatgatggggcagcggcccatggcgccctaccggccctcccagcaaggctcttcccagcagtacctgggccaggaggagtactatggcgagcagtacagccacagccagggcgccgcggagcccatgggccagcagtactaccccgacggccatggcgattacgcctaccagcagtcatcctacacggagcagagctacgaccggtccttcgaggagtccacgcagcactactatgaggggggaaactcccagtacagccagcagcaggccgggtaccagcagggtgccgcgcagcagcagacgtactcccagcagcagtaccccagccagcagagctaccccgggcagcagcagggctacgggtctgcccagggagccccgtcacagtaccccggctaccagcaaggccaaggccagcagtacggaagctaccgagcaccgcagacagcgccgtctgcccagcagcagcggccctacggctatgaacagggccagtatggaaattaccagcagtaagggacacacattctggctggagcccttgtggtagcgtgttcatccaggggccggatgggctggcggcagctctggtgaattgtgacatgttggttacctgttcgcccagtgccacgtctgcatgtgaagcgtgctcatttcatgctgggtatgacgccgagcgcacaccactggcgtgagacagcgcttggtggtgtgatacttttggtgctgtgtatagtattgtatgtcggtacacggagaggtatcctttttttgtcccccgcccccttctcaatgtttctagctagctttgggggtcattttgtcatcagagcattctgtgcccagggacaggacagatctcgaggacaccacagtccacctgttcccgtcaacagacgttaggtctcattttcctcctcatgcagtgttgtagtgtgggttgtcaacttttctttaactggctacgccacagctggacacacatgcagcccctggagggcagcctcttcctgtgcctcgatggggtgggtgggagggcatcttctgtgcgttgggtcagtttctgttacgtaacgaaaaggataaacatctcccacgggagaggccacagatggccacttccagagcttgcccattgcctgtctctcgccaattccgtttatccaaaaaggtacatgtttttgtattaaaaagtaaacagggatcagtgactgtattccaaataaatatgaatccctaagggccgtggacaaattgcctaacccagggccagcggtattgctgaaggaaaggggcagctctctgggaagtgggccctcagagattactctggctttgacccttgtttagctgatggtcatttctgggattggaatatttaataagcccaattctaagttgataggtaattttaaatattcaaaccaaatcttcccaacagttggcaagttgtttattttatattatttcttccaggacctacttgctcagatctccaagcaagcatttcttttcttttagggatgtctgaaagtcacatccagttacattactgtgttctttctaatgaaaagtaaaggttttatatagagaaacttgagtaatttttacatttctaagacattaaatcccatttaaattctgtgtgaacattaaagacagcacacttgcaaaagtatggtcaaaggaaaaaaatcccacatttcaattaacaagtagcatggacatttgatcaacctttagttggaataataatattcatatttgctatgaatccttttaaaaaaatctttggataaatgctgacagatttccaagaactaccaagaaaatacaagagatatccaatgcttgatatatgaggcctagtaataacgatatttctctttaattgatgttttgttttaaaagttaaaagtaattcttggcgtggtggttcacgcctgtaatcccagcactttgggaggccgaagcgggcggatcacctgaggtcgggagttcgagaccagcctgaccaacatggagaaaccccgtccctactaaaaatacaaaattagccaggtatggtggtgcatacctgtaatcccagctactcgggaacctgaggcaggagaatggcttgaacccaggagacagaggttgtggtggggcaagatcgcaccattgcacccgagcctaggcaaacaaagagtgaaattccgtctcaaaaaaataaataaataaataaataaataagttaaaattaattcatttatccagagtcgggtgctttagaatttataagtcacttatgtgttttgcttgaattaattctgacagcccctatgaggaaatcatggaggcaggtaacagttcccattttagagatgaagaactgaggcacagattaaaggacttgcctgtgttgaataccagtcctgttctaggacattctcccctctcctaggagacggatgtcacgcacaaatggggagagaagtgtttattttgtaggcactaagggtttctaaaacccttaacactggtaagggctcaaaaataaacgtatgtgttcatattcgatcaccgaaatgagagttcttaattgctaattgacaaacgcgttagcaatttcagttagggagtcatctcccttgattgtgttcttttcctgtcaattttcatagacctaatttgcaaactcaatcggggactaaaatttcccactgaaaatgttaaacattttagataactgtgaagatagtttatttttattccttgccaatctgggaatatgccttttttgtgtgtttgtgtgtttttttaagtgctgtattaataatactttctgaaagaaaaggacacttaccccaaaacttcaatctgaaatgtcttacattaagaatatcttgaatgttgtgtatatattttaaaaagcactttgcaaaatagtttgtacatttatttcctaatttatacatgatttttggtgttaatatatttaatgattaataacagaatgtttatttaatgtgctgtccatttttatgtaatattatggggaaagtgatgccagcagttccttttcattattctatcttctgtcatatgaatgttgagcaaagcttaggccaacatgaattgtttgtgaagtgtggttgatggtgctttgtttttttctgactacttctatggaaggccagtgaagaagcaaaggaagacatgaaaattgacgctcattcttcttcctattgttccctgacatccagcaaattgtgaatttgaaaaatgatggccagttttcagaagtgctgacaaattcatattggtatgcaaaagctcatcacccattaaggtttgttgttgaatcaacagtactcagcatattaaaacagtacatcagaactcatgccaacagtctttatgatgggattaaggtggacaagatctcctaagatctgtgaatgggattaaggtggacaagatctcctaagatctgaaaagaaaccttaatacgctcatatggttggagtgttaagtgaacctctgattttgtcagggtttttctacgtgtaggcgtgaatagggggcaccccttcaaaactgtacaaagaagacgactgttttccatttccatttaaacatttttagccacttcatttctatttattgaacaggtcaaatttgtcttgttatttgtgagtacagtacatttaaaaaacatccttatcggttatttttttttcagtcggagtttgacgtataaattgtttatgcttttggtgtaatctcttaataaactggttcttcaaaaatcatcctaaaaaaaaaaaaaa

SEQ ID NO: 9 - DNA, 1498 bp, Homo sapiens
  CDS (78)..(1064)
actgaaagttacgttcataacttacagaggattagtgtatattttccaacctgaggcatgaaattctgaggcttattatggaaaaactactcaagttggatgtgaatgcatcccggcagggtattgaagatgctgaagaaacagcaactcaaacttgtggtgggacagattccacggaaggattgtttaatatggatgaagatgaagaaactgaacatgaaacaaaggctggtcctgaacggctcgaccagatggtgcatcctgtagccgagcgcctggacatcctgatgtctttggttttgtcctacatgaaggatgtctgctatgtagatggtaaggttgataacggcaaaacaaaggatctatatcgcgacctgataaacatctttgacaaactcctgttgcccacccatgcctcctgccatgtacagtttttcatgttttacctctgtagtttcaaattgggattcgcagaggcatttttggaacatctctggaaaaaattgcaggacccaagtaatcctgccatcatcaggcaggctgctggaaattatattggaagctttttggcaagagctaaatttattcctcttattactgtaaaatcatgcctagatcttttggttaactggctgcacatataccttaataaccaggattcgggaacaaaggcattctgcgatgttgctctccatggaccattttactcagcctgccaagctgtgttctacacctttgtttttagacacaagcagcttttgagcggaaacctgaaagaaggtttgcagtatcttcagagtctgaattttgagcggatagtgatgagccagctaaatcccctgaagatttgcctgccctcagtggttaacttttttgctgcaatcacaaataagtaccagctcgtcttctgctacaccatcatcgagaggaacaatcgccagatgctgccagtcattaggagtaccactggaggagactcagtgcagacctgcacaaacccactggacaccttcgtcccctttgatccctgtgtgctgaagagacctgcctttcgccttctgccatgattgggaggcctccccagccacatggaactgtgagtccattcaacttctttttctttgtaaattacccagtctcgggtatggctttatcagcagcatgaaaacagacaaatatactgttgtttcttattaaatgttattggcttattttgaaaacaaaagcttaccaaatacatgtgattatgggaaggggccagaaagttacactgcaagtaaaaatatcagtaactatgtttactgggtggcgatggcaaaaacaatagtttttcctttttttttttttggagacaggatcttgctctgtcgcccaggctacagtgcagtggtgcaatcacggcccactgcagcctcgacctccggagctcaattgatcctcccacctcagcctcctgagtggctgcatctacagatgtgagccaccaaaaaaaaaaaaa

SEQ ID NO: 10 - DNA, 1396 bp, Homo sapiens
  CDS (154)..(393)
ctggaagcagggagggggcttccaggtcacagagagcctacgactagatttgcatctttacgtcctgcgcggaggctgctacacacatgcagaagtcatgctggtggcctggacattgaagggagagaagtggatttgggagacatttaggagatggcaccgaaagcgaaggaagctcctgctcctcctaaagccgaagccaaagcgaaggctttaaaggccaagaaggcagtgttgaaaggtgtccgcagccacacgcaaaaaagaggatccgcatgtcactcaccttcaggcggcccaagacactgcgactccggaggcagcccagatatcctcagaagagcacccccaggagaaacaagcttggccactatgctatcatcaagtttccgctgaccactgagtcggccgtgaagaagatagaagaaaacaacatgcttgtgttcactgtggatgttaaagccaacaagcaccagatcagacaggctgtgaagaagctctatgacagtgatgtggccaaggtcaccaccctgatttgtcctgataaagagaagaaggcatatgttcgacttgctcctgattatgatgctttcgatgttgtaacaaaattgggatcacctaaactgagtccagctggctaactctaaatatatgtgtatcttttcagcataaaaaaataatgtttttcataagaatgacaacttaattagaatcaaatctataagctttaagattttacgtttctagtaagtataatattagcttatttgactagaactcaagcagaataggaatttatgcttgttttatattcaataatgataattttgaagatatagttgttttattacaccaaaaatactatattaatcttatttaactaagttttatccaaatcatgttaacttaagaaacatttgatcagttcctatatttctaggagtttggtgaatatttatttataaatgcttatttttttccaagccaagttagaatagagcacttttagaggatttcataaatgaattttgtaatgctctctggagttaagaaaatatcacatatacataacgtacattaatagatacacaaacacaaatagagatttcatagctttcatcctgaaatttcagccatgaatcaggcataaatattctgatggttaatttcagacatctacttgatcggattgagagacacacatagctggtcaaacacgatttcagccatgaatcaggcataaatattctgatggttaattttagacatctacttgagtggattaagagacacacgtagctggtcaaacatgatttcagccatgaatcagccataaatattctgatggttaattttagacatctacttgagtggattaagagacacaccctgtatt

SEQ ID NO: 11 - DNA, 2944 bp, Homo sapiens
  CDS (155)..(2941)
cgcggccgcgtgaggacgaggctatttgaaaacacgctccgggagctagagcctgaggtcggcggcgcacgctgttgccccgtgggcttctgctccctcgcttgtcttctcgggcttctcgccccggccgcggccgggtcctcagtagtcgagaatgactaaaaaaagaaaacgccaacatgattttcaaaaagtaaaattgaaagttggtaaaaagaagcccaagttacaaaatgctactcctacaaactttaaaacaaagactatacatctgcctgagcaactcaaagaggatggaacacttccaacaaacaatagaaaacttaacataaaggatttgctgtcacagatgcatcactacaatgctggggttaaacaaagtgctcttcttggacttaaagaccttttgtctcaatacccatttataattgatgcacacctttcaaacatattaagtgaagtgactgctgtgtttacagataaagatgctaatgtacgattagcagcagttcaacttcttcaattcctggcccccaaaatacgagctgaacaaatttctccattttttcctttggtaagtgcccatctctctagtgccatgactcacattactgaaggaattcaggaggactctttaaaagttttggacattctgctggaacagtacccagctctaattactggccgtagcagcatattgcttaagaattttgtagaacttatttctcatcagcagctgtccaaaggactgataaatagagacagatcccagtcctggatactttctgtaaatcctaatcggagactcacttctcagcaatggaggctgaaagtcttagtgagactcagtaaattccttcaggccttggcagatggatccagtaggttgagagaaagtgaaggacttcaggaacagaaagaaaatccccatgccactagcaactccatttttatcaactggaaggaacatgccaacgaccagcaacacatccaggtttatgaaaatgggggttcacagccaaatgtcagttcacagttcaggctacggtatctggttggaggactgagtggtgtggatgaaggcctgtcatctactgaaaacctgaaaggatttattgagataataattccattgctaattgaatgctgggttgaagctgtacctccacaactagctactcctgttgggaatggtatagaacgagaacctctacaggttatgcagcaagttcttaatattatttcccttctgtggaaactctctaaacaacaggatgaaacccataaattggagtcatggcttcgaaagaactaccttattgattttaaacaccattttatgagtcgttttccatatgtcttaaaagaaataaccaagcacaaaaggaaagagccaaataaaagcatcaagcattgcacagttctctccaataacatagatcatctcttactgaatttaacactgtctgatatcatggtctccctggcaaatgcgtcaactttgcagaaggattgcagttggatagaaatgataaggaaatttgtaacagagacccttgaagatggctctaggctaaatagtaagcaactgaacagattgctgggagtatcctggaggttaatgcaaatacagccaaacagagaggacacagagactcttattaaggcagtttatacattatatcagcagaggggccttatccttccagttcggactttgttattgaagtttttcagtaaaatctatcagacagaagaactgagatcttgtagattcagatatcgtagtaaagtgttatcccgttggctggctggcttaccattgcaacttgctcatcttggctcccgaaatcctgagctctctacacagcttatcgatatcattcataccgctgcagcacgagcaaataaagaattactaaaaagtttacaagctactgccctccgaatttatgatccacaagaaggtgctgtggtggttctccctgcagactctcagcagcgtttggttcagcttgtatatttcctacccagtctgccggctgatttgctttctcggttaagtcgttgctgtattatgggaagactcagttcaagtttggctgccatgcttatcgggatactgcacatgagatcatcattttctgggtggaagtattcagctaaagactggttgatgagtgatgtagactatttcagtttcttattttccacacttacagggttttcgaaagaggagttgacttggcttcagagccttcgaggagttcctcatgtcatccagacacagctttcccctgtgcttctctaccttacagatttggatcaatttttacaccactgggatgtaacagaggcagtttttcacagtttattggttattcctgcccgaagtcagaactttgacatcttgcaaagtgccatcagtaagcatttggttgggttgactgtaattcctgacagcacggctggctgtgtttttggtgttatctgtaagctcctggatcatacttgtgtagttagtgagactctactgccatttctggcttcttgttgctacagtcttctttattttctgctcactatagagaaaggggaagcagaacatctaagaaagagggacaagctgtggggggtctgtgtctccatcctggctctcttgcctcgagtcctcaggttgatgctgcagagcctgcgggtgaacagagttgggcctgaggagctgcctgttgtgggccagctgcttcgactgctgcttcagcatgcacccctcaggactcatatgttgaccaatgcgatcttggtgcagcagatcatcaagaatatcacgacattgaagagtggaagtgttcaggaacagtggctcacagacttacattactgctttaacgtgtatatcactgggcatccccaagggcccagtgcactggctacagtgtattga

SEQ ID NO: 12 - DNA, 2156 bp, Homo sapiens
  CDS (84)..(1808)
gcgagtcgggtggtccctttggctggagtgcctctctggtctggggatcacctcaggcgctgtccttcactgggcgatccagcatggaccccgaggacgaaggggtagcgggagtgatgtctgtggggccgccggcggcccggcttcaggaaccagtgaccttccgggatgtggctgtggactttacccaggaggaatgggggcagctggaccctacccagaggatcctctaccgtgacgtgatgctggagacctttggtcacctgctctccataggtcctgagcttccgaagcctgaagtcatctcccagctggagcaagggaccgagctatgggtggctgagagaggaaccacccagggctgccatccagcctgggagcctcgatctgaaagccaagcatcacgcaaggaagagggcctgcctgaagaggagccatcccatgtcacgggaagggaaggattcccgacagatgctccttatcccaccacgttagggaaagacagggagtgtcagagccagagtctggcactcaaggagcagaataacttgaagcagttggaatttggcctcaaggaagcaccagttcaagatcaaggctacaaaactctcagactcagggaaaactgcgtcctgagttcaagcccaaatccattcccagagatctctagaggggagtatttgtatacttacgactcacagattacagactcagaacataactccagcttagtcagtcagcagacaggctccccaggaaaacagcccggtgaaaacagtgactgtcacagagattccagtcaggccattccaattacggaactcacaaaaagccaggtgcaggacaaaccctacaaatgtactgactgtgggaagtcgtttaaccataacgcacacctcaccgtgcacaagaggattcatacgggagaaagaccttatatgtgcaaggagtgtgggaaagccttcagccagaactcctccctcgtccagcatgagcgcatccacactggagacaagccctacaagtgtgccgaatgtgggaagtctttctgccatagtacacaccttaccgtccatcggaggattcacactggggagaagccctatgagtgtcaggactgtgggagggccttcaaccagaactcctccctggggcggcacaagaggacacacactggggagaagccatacacctgcagtgtgtgtgggaaatccttctctcggaccacttgccttttcctgcacctgagaactcacaccgaggagaggccctacgagtgtaaccactgcgggaagggcttcaggcacagctcatccctggcccagcaccagcggaagcacgcgggggagaagccctttgagtgccgccagaggctgatctttgagcagacgccagctctcacaaagcatgaatggacagaagccctgggctgtgacccacctttgagtcaagatgagaggactcaccgaagcgacagacccttcaaatgtaatcagtgtgggaagtgtttcattcagagctctcacctcatccggcaccagataactcacaccagagaggagcagccccatgggcgaagccggcggcgtgaacaatcctcgagcaggaactcacacctggttcagcatcaacacccgaactccagaaagagctctgcaggcggagcaaaggcagggcagccggaaagcagagccctggctttgtttgacatccaaaaaatcatgcaagagaaaaaccctgtgcacgttattggggtggaagagccttctgtgggtgcttccatgttatttgacatcagagaatccacataggagagaaactttgctgatgacttttaaccacaagtaaaaaatgtggtaagtccacatagtgtactcatggaaggaggggctgggggtagaaatgtcatgggtgacttctgactttctaaggaaatgatgcttcccaagcacccgaggttggttggtcccaaatctatcaaactcagtgccctctttagcgacatattttgtgacattccttccattacaccacagtgagttcacaggtaatataacctacccacctgtgtaatgtcaaaaaaaatcaatatgcggccccattttgtaaaggatcattaaaatgaaagtaatttatggtagagtaaaaaaaaaaaa

SEQ ID NO: 13 - DNA, 5745 bp, Homo sapiens
  CDS (92)..(1543)
gcttccccgtgtccctcagattgcaaaggctttctgtgatgatgcagtgggactgagattcaatcctgtcctgtaccccaaggcctcccaaatgattgtgtcctatgatgagcatgaagtcaacaacacattcaaattcggagtcatttatcaaaaagccaggcagaccctggaggaggagctatttgggaacaatgaggagagcccagcttttaaggagttcttggacctgctgggggacacgatcacactgcaggatttcaaaggtttccgaggaggcctggacgtgacccacggacagacaggggtggaatcagtgtacacaacattccgggacagggagatcatgtttcacgtttccacaaagctgccatttaccgacggagacgcccagcagctccagagaaagagacacattggaaatgacatcgtggccatcatcttccaagaggaaaacacgccgtttgtcccagacatgatagcctccaatttcttacatgcctacatcgtcgtgcaggtcgagaccccaggcacagagaccccatcctacaaggtctctgtcactgcgcgggaagatgtgcccacctttggtccacctctgcccagtccccccgttttccagaagggcccggaattcagggagtttctgctcaccaagctcaccaatgccgagaacgcctgctgcaagtcggacaagtttgcaaagctggaggaccggaccagggctgccctcctggacaaccttcacgatgagctccacgcccacacacaggccatgctgggactgggcccagaggaggacaagtttgagaatggaggccacggggggttcctggagtcttttaagagggccatccgcgtacgcagccactccatggagaccatggtgggcggccagaagaagtcgcacagtgggggcatccctggcagcctcagcgggggcatctcccacaacagcatggaggtcaccaagaccaccttctcgcctccagtggtggcggcaacggtgaagaaccagtcacggagtcccatcaagcgacgctcggggctcttcccccgcctgcacacgggctcagaaggccagggcgacagccgggcacgatgtgacagcacatccagcacacccaagaccccagatggtggacactcctctcaggagataaagtctgagacctcatccaatcccagctctccagaaatctgccccaacaaggagaagcccttcatgaagttgaaggaaaacggccgcgccatctcccgctcctcctccagcaccagcagcgtcagcagcactgcaggggagggcgaggccatggaggagggcgacagtgggggcagccagccgtccacgacctcacccttcaagcaggaggtgtttgtctacagcccgtccccgagcagcgagagccccagcctgggggcagctgccaccccaatcatcatgagccggagtcccacagatgccaaaagcagaaactccccgagatcgaacctgaaattccgctttgacaagctcagccatgccagctctggtgcgggtcactaatgtgaaagtggagtccttcgcctgtccaagggaatcccctcttctgtcctggaaaaggctcctgacctcccagtgtgatgtccgggtcctttatcatcctattcatcctggagaggaaaagtgtcgggcaaagggggatctggggggagctcagcagtgactggggagctggtctgcctcagagacagagtagggggtgggagcagagcctcggtgagggtcttggccacagggcagtgccttcctgaacgtggcaggctttactaccaggaacgcactcggtggtggaggccccatgttcccaggagccaagattcgtagcatccttgaggccatcctgataaaattcggcgctattgcccccgtagctctggagctctaaaccgtctatctgcttctgtgctgaacgcctttcccatctgctgacgtaggcccagggctgccctgcccctgctgccagtgtaccgtgagcggggctccagccagttcaagctcagagccagagctggacgggccagaactgcgctgcacacttcctggactgaggcggggactttgggtcccacccggtttctcctgattatggctgctgtggggtgaggggagggaggggcagccccgaggcagtctcttccctttgagaagatattttcccacaaaggggtgggaagccaggagtgagaaggaattcagggagagcaaaggagccagtgctgagatgctgctgtgttggttgaggaaaacctcgggcctgagggccaggccggagcccaggtctctgctgacaatgggggttcaaggaagacgtcgttatctcccctccccacttactcgaggagagaggtgagggggggatgacttgcgggttctgatcaggcccctgggtggggaaggggcacagtgtccctcagcagcttacgcccctggagtcttggggggcccagcctggccctggggccttttccagctactgtgcccttgggcagctgcgtctggggctcaaccccccaatcctgttcccctctccagctgcgggtctgtaggcagctgtcacatctgaagggtttctgcaacctggaccccatctgggtgtgggtcagaccctgtgacccacatgccacccccaccctccacagagcccccttgctgggacagccagctcacctccaaggacatcccctcctggcttctcccccttccgagtctgcagcgccgtgggcttctctgccgatgggcccgggttggggttaaggtgggcatcctccaggtacaacgagcctgaagagcccctttcagtgcagacggggctgcagagtgacactggctgggcacctgccccacgaccaatgacaaggatttccagctgaatgctttattcccatagggatctggacctgtgcccaagatataaatactacactttttttttttttttttttttaactgacattgtgaaattctccctatagcttttgccattcaagcaacattgtgatctttcttccccgccacgtgtgtgggaatgattgagtcctgtttgcaagctggagaggagctctcccttcgctagtactttctctaaagtactagtctagtaaaatttattcttgttagaaggtcaacaaaatatctgtttagcttttatgaagagtcaccgtagcagcccccacggctggaaagaggcccgtacgttctggacgcgttttgttggctgggcttctggaggcactggcaaggtcaaactgcatttctttaagaacagttgcaggatctggcttgcctctgtgggaagccggcattacaggtgcttggtggatgggccgtgtcacattgccatctggggtcctttggggtttccaggttgtcagcatgctgtcccatttgggaatcccatacctgcctgtccccactgcgctggctgacccttgctgcctgctgcctcttgggagggctttgtccctgcctctgagctggtgggcaggatggctgggtggcccccagagaagcacagacctgggatggggtctccatgcccggtttgctgttggaatgatctgaacaggaccccaaatgcctcttccctctggtcatgcctcactatctctaggagctccatcctgtggcttccagagtgtgcacttccagcccacccgggcagtgctgagagggaggaggagaacaaggatggcccagcctcccctccctcccctagaccacggggcgggcagctcgggttcctggagggctgtttcccccacgctgtccctacatctgctctgatctaaaatgtctttccttttatgctgcgcccagtcttggggctcaaagatttgcccaaacctcattggccctcgtgactaggctcatctagatggtgctcacgctggtgtttgaggcatttccactgtgatctccacgaggggatgttttccgggacacatctctggctctgggaactgcctgactcactgaagaaactacttttcaggcactgtagggtcacccatatgcctccagctcagttgacgcttaaaaacaggtgcagaaaagctcgcgatggaaggtcttaatgagagtgtctgtctatgccagtcatgtaaaatgacgtttcttgaaaaagattcagtggttcagctttgtcagcatcatctcaacacaagcctgctggctctttttagcatctcatccaaccatgtcatcgtccagatgagaaatcttagcccaggtgaggggaataacttgcttgaggtcacacagctggctgttggcaaagctgggattagaaccctcaacccagggtcccttcctctgcagcgcctacatggttggttgaataagtggctgcgtttcctggggccctgggttttggggaagccagttagctgctgctttggcactggcatggaggtgagcagtcaaggatgctggtgaggccgcagtttctgctctttttcatcaggggggatagtctctaggatttttcagtgaggacccttgggctttggatgcagcttgaaccaagaaaacgaggagggaaagggattcagtgaactattcctcagtgggatcggttcttcagctcctgatgggggctgtgtaatgggggcagaggccagggaaaaagatgctgttcacccaccctcagcttcccttttcctaaattaagaggaaaagtggtcaaagaaaaactcttcatttctccctgattcttaaacgaaggtggttaatagaaactcaggctcccgtgacaaggcaggacaagagcctgtttcgctttcctccctgaccctgccaggtgccaactcaaacactacctttctcattggtttctaagtcagtagagacagatctgttttaagcagttgggggttcgagtagatctcatgggtacaggaggccagcagggaccaggccagtcagccatgctcaggacccctcggctcctcccccagcctctagctaccctgtatcgaggcaaggggaggccagtaaagtttgccaagcctgatcctgcagcctggtggggctggctggggtattcttttaccaaactctgttttaccgccagccccttgtacaccccaatcccatgtctccctcccttcagctggaccgtgtgcccctttgggaggaagaagacaagccccactagggccaagggcagcagagccctgccgagtgagaggctgtggggcagcggctctgtcctgtgccttaccagccctggggagggggacatttggctggaagactggaatttaattgccatcgtctttgattttgtgacatttctgcttggaagtgtgaactaccctcccccccccggcttcctgctccttagcatgcgtgcagctctctcctgttttgggtgttccccttggacactccagctcggggactgctggcgtgtgaatgtgcagattcccctgtgtggtcgaacctaagaactgtggcttggaagtgatgctccatgtgacgacgactttgctttctttcctcttagtgaggaggtgattcgtagatcccaactgcctatgtaatgtaaataatgtacatttaatttattgctatggtagcacattgtatttgttaatgtacaaaacaaattctaaaaggttgacaaatgtatattttgttgcttaaatgtgtctttgcaaaaattgccaataaataacatattttgtgtccaaaaaaaaaaa

SEQ ID NO: 14 - DNA, 1476 bp, Homo sapiens
  CDS (83)..(1171)
cctccccagccgaggttctcggcaccgccttgagagcttcagctgccccagggtgtgcagattagaatcccaagaaaatcaaatggcatccggggatttctgctcacctggagaagggatggaaatacttcaacaagtgtgcagcaaacaacttcctccttgtaacctgagtaaagaggacctgttacagaacccatacttcagcaagcttctcctgaatctctcacagcatgtggatgagagtggcttaagcctcaccctagcaaaggagcaggctcaggcatggaaggaagttcgactgcataagacaacatggttgaggtctgagattttacacagagtcattcaagagttgcttgtggactactatgtgaagatacaagacacaaatgtaacttctgaggacaaaaagtttcatgagacccttgaacagcggctgcttgtaactgaactgatgcggctcttaggtcctagccaggagagggagatacctccactgctggggctggagaaagcggaccttctggaactcatgccactctcagaggattttgtgtggatgagggctcggctacagcaagaagtagaggagcagctcaaaaagaaatgtttcactctgctctgctactatgatcccaattcagatgctgacagtgaaaccgtgaaggcagcaaaggtgtggaaactcgcagaggtcctggtgggtgagcagcagcagtgccaggatgccaagagccagcagaaggagcagatgttgctgctggagaagaagagtgctgcttactcccaggtgcttctccgctgcctcactttgctgcagaggcttcttcaagaacaccggctgaagactcaatccgagctagaccgcatcaatgcccagtacctggaagtcaagtgcggtgctatgatccttaagctgaggatggaggagctaaagattttgtccgacacttacactgttgagaaagtggaagttcatcgtctgattagggaccgtttggagggagccattcacctacaggagcaggacatggagaactcaagacaggtcctgaactcctatgaggtccttggggaggagtttgacaggctggtgaaagagtacaccgtactcaagcaggcaacagagaacaagcggtgggccctccaggagttcagcaaggtctaccgttgagctctggcagggccaggagacatggcttctgcatagctgctgcctcctaatcttcctgctagtgggaccaccttcacctggggctgccttcagtacaagggagtgtggaaatgcttacgcttgaaacactgcagtcatttaggcactctcctggtttctctttattttttatgactgggcctcttctggaaaatctagcaaggagatttatataatttttatgcatagctgtgtgtcagtgtcagccctgtattgtatttgattatctcctgaataaagttatgatattataaaaaaaaaaa

SEQ ID NO: 15 - DNA, 384 bp, Homo sapiens
  CDS (22)..(306)
aaaagacctagtgtgccaaaaatgaatgtcaaggtgggcaggtggagtcaggtagtttttaggccatttatttgtaaacagttattttatctatgcgtctatctgtctgtctgtctgtctatctatctatctatctatctatctatctatctatctatctatctatctatctatctatctatctatctattttattttttgagatggagtcttgctctatcgtctgagctggagtgcagtggtgtgatctcggctcactgcaaactccgcctcccgggttcaaccaattctcccacctcagcctcctgaccagctgggattacaggcgtgcgccaccacatccagccaatgtttgtatttttagtagagacggggcttcaccat

SEQ ID NO: 16 - DNA, 1644 bp, Homo sapiens
  CDS (143)..(841)
ggcggggtctcctgagttggtggtccttgaccctccatgggacaaggagctcgcggctggcacagagagccaggccttggtctccgccactccccgagaagactttcgggtgcgctgcacctcgaagcgggctgtgaccgaaatgctacaactgtgcggccgcttcgtgcaaaagctcggggacgctctgccggaggagattcgggagcccgctctgcgagatgcgcagtggacttttgaatcagctgtgcaagagaatatcagcattaatgggcaagcatggcaggaagcttcagataattgttttatggattctgacatcaaagtacttgaagatcagtttgatgaaatcatagtagatatagccacaaaacgtaagcagtatcccagaaagatcctggaatgtgtcatcaaaaccataaaagcaaaacaagaaattctgaagcagtaccaccctgttgtacatccactggacctaaaatatgaccctgatccagcccctcatatggaaaatttgaaatgcagaggggaaacagtagcaaaggagatcagtgaagccatgaagtccttgcctgcattaattgaacaaggagagggattttcccaagttctcaggatgcagcctgttatccacctccagaggattcaccaagaagtcttttccagttgtcataggaaaccagatgctaaacctgagaactttataacacagatagaaaccacaccaacagagactgcttccaggaaaacctctgacatggtactgaaaagaaagcaaactaaagactgcccccagagaaaatggtatccattgcggccaaagaaaattaatcttgatacatgagctctttctgtttattttgggagttgaaaataggcaccatcaacatttagattacagcctaattaatacctagataagacttcatttgaaataagaaataactcttttactagtgattcatttatacagatatagtatctctgtgcggggatatgatataatattgtatttccttactgttttatctattgtaaataaaaagcattttaaaaagtattgacacaaagcccatcagtgggcattaaaaatattaaaagtgcagacttttactgtccttaagtgccatcaactctcagctcccttgtagcttttgtgggatttaacaagtaacaaattctgttgtgtttccctggtatacatctttctaggaaaaaaaaaaaaagagagagagctgtataatgatttttcgtttacatgctgaaaagtaattatcagttctgcacagcagcagatgcagggtttttttttaaagatgtagtttgatttatcaaattaatgtgctgatgataatactggctttgactttgttactccatgttcagctaatttaggtttgtgagattaactttaggattttttgttgtgtaagacaatgataactattatttgtgcaacattactctttgaaataaaaattggcatgtagccaatgtttcctgcccacactcacttttttctatagaccattaacataatttgacttggaactaatggtttctttttagggtttcttatttatttctttacaaatcattccagttcaaaatatatatcagattaatacactgaaaaaaaaaaaa

SEQ ID NO: 17 - DNA, 2308 bp, Homo sapiens
  CDS (150)..(788)
gcggaggagcagtcgcagctgctttccgaggaagccggtgttgccgagattgccaaaatgctttggagtttttaactgaatctaagaaaagtccaaaatagatttgagactgtaaaaacagaaactgcagcaagggggattcagtgccaatgcatcaacaaaaaagacaaccagagttagtggaaggaaatcttcctgttttcgtgttccccacggagctcatattttatgcagatgatcagtcaacacataagcaagtgttgacactgtacaatccctatgagtttgccttaaagttcaaagttttgtgtactactccaaataagtatgttgtcgttgatgctgcaggtgcagtaaagcctcagtgttgtgtggatattgtgattcgtcatcgagatgttcgatcctgtcactatggtgtaatagacaaattccgtctccaagtttccgagcaaagccaaaggaaggctttgggaagaaaagaggttgttgctactcttctcccatcagcaaaagaacaacaaaaggaagaagaggaaaaaagattaaaggaacatttaactgaaagtttattttttgagcagtcgtttcaaccagaaaacagagctgtatcctcaggacctagtttactaactgtcttcctgggagtggtgtgcattgcagccctgatgctgcctacactgggggatgtggaatcgctggtgcctctctacctccacttaagtgtgaatcaaaaattagtggctgcttatatcttaggtcttatcacaatggccatacttagaacatgagcaaggatttcaattgacttctgaagtaaatctgtcttgaaaatatgaatgtggactgccttttatctctatttcactccattaacatgcaacaaactattgaatgatttcaaataattgcaaatgtataatatatattttaaattataatttaatttgaaggactgcagaacattattttacagacagcaaggatgcttctgagtgacacctaggaaattatttgaagaaattctttttatatctatacctgttgtgtaagaaactttaaaacatttgttattttctcacctttttttctaattcactttgattgctaggggtcatgtatgcttcgaagttacaggactaaaagagcaaactgaccggcctaaaactaaaatgacatttattccctagctacaaacatcagcgttattatgttaattataccttgccctctatcattataaatggttgccatggtgtttctaaaaataagtgttttaccattaatgtgtagagggcaaacaaagcataaagtactaagggatcatgcttatcctagggtctcacagaagagaggacatatttaattaatcttgtgaattacagaacaggttgtggtccagacaccaagaatcataggggtttttttttaaaaaacctaatagaagtagggtgacctctctctttggtctaagagttctaaaggaaggtaggcatctgtttaattagttggttcaccctggctttacctctggttaatgctttgtgttaataggaaggaaaaatcactttatcttttcttccaagcccctccctgcctgacttacccagactgggattaccagataccaggtgatttatgtggagatgatttttcacctttaaactctaagccaagtgtaagaaactcttgatagctatgtctattttatatcagtcactgagacttttttttaagtttttatttattattaagacaactttgccaaaaaagtcccctaagcacaactatttacatttctttatagcctcttctgatctctaacacatatgcagttttaactgttattttcatagtaactgatcttttgtctaaggatttttacctgaaagcacaatgtattgagtctcttgaaaatcatctttcagatctttttacagaatgaacttatgcactgctactgtagtattctcaaggaatatatgtaaacacaaatgtatgcctgaggttggtttttgcagaaaacagtctctgcttctaaaaacttctatgtctagtcttccataggaaatcctcactgtttaaccatgtgaggagcctaagtcacctaagtcattaaacggatcatgtctgtacattgtgtaatgaatgaaaagcacataaatgtaatctactttgaactttgtaaaaatgatgtgtggaggctattcttgtttctccatctcaagtcctgtgtgtgcacgtgtgtgcaagtgcacatgtgtgtgtgtaataacacattgtaaagaacagaaattactttaaaaaa

SEQ ID NO: 18 - DNA, 1833 bp, Homo sapiens
  CDS (71)..(1492)
gagaaggtcgctgtcaagatggagtttccaacccagtaaatccaagggccagaccgtgacctcataaagcatgatctccttctgtccagactgtggcaaaagtatccaagcggcattcaaattctgcccctactgtggaaattctttgcctgtagaggagcatgtagggtcccagacctttgtcaatccacatgtgtcatccttccaaggctcaaagagagggctgaactccagttttgaaacctctcctaagaaagtgaaatggtccagcaccgtcacctctccccgattatccctcttctcagatggtgacagttctgagtctgaagatactctgagttcctctgagagatccaaaggctccgggagcagacccccaacccccaaaagcagccctcagaagaccaggaagagccctcaggtgaccaggggtagccctcagaagaccagctgtagccctcagaagaccaggcagagccctcagacgctgaagcggagccgagtgaccacctcacttgaagctttgcccacagggacagtgctgacagacaagagtgggcgacagtggaagctgaagtccttccagaccagggacaaccagggcattctctatgaagctgcacccacctccaccctcacctgtgactcaggaccacagaagcaaaagttctcactcaaactggatgccaaggatgggcgcttgttcaatgagcagaacttcttccagcgggccgccaagcctctgcaagtcaacaagtggaagaagctgtactcgaccccactgctggccatccctacctgcatgggtttcggtgttcaccaggacaaatacaggttcttggtgttacccagcctggggaggagccttcagtcggccctggatgtcagcccaaagcatgtgctgtcagagaggtctgtgctgcaggtggcctgccggctgctggatgccctggagttcctccatgagaatgagtatgttcatggaaatgtgacagctgaaaatatctttgtggatccagaggaccagagtcaggtgactttggcaggctatggcttcgccttccgctattgcccaagtggcaaacacgtggcctacgtggaaggcagcaggagccctcacgagggggaccttgagttcattagcatggacctgcacaagggatgcgggccctcccgccgcagcgacctccagagcctgggctactgcatgctgaagtggctctacgggtttctgccatggacaaattgccttcccaacactgaggacatcatgaagcaaaaacagaagtttgttgataagccggggcccttcgtgggaccctgcggtcactggatcaggccctcagagaccctgcagaagtacctgaaggtggtgatggccctcacgtatgaggagaagccgccctacgccatgctgaggaacaacctagaagctttgctgcaggatctgcgtgtgtctccatatgaccccattggcctcccgatggtgccctaggtggaatccagaactttccatttgcagtgtgcaacagaaaaaaaaaaatgaagtaatgtgactcaaggcctgctgtttaatcacagataagcttctagaacaagccctggaatgtgcattcctgccactggtttcaggatactcatcagtcctgattagcctcccggagggccccagtttccctcccgtgaatgtgaagttccccatcttggtggcctgcccttcagccagtgtcctagcaaagctggatggggttgggcccggcccacaggggggacccctcctacccttgacacctctgtgctttggtaataaattgttttaccagaaaaaaaaaa

SEQ ID NO: 19 - DNA, 4109 bp, Homo sapiens
  CDS (115)..(1218)
gggcgactcccgctcgtgccccggagtcaccgccgtccgcggatccggcgctagtagcggggcctgccgaggaagccgagtgcccgccgccgcgccagcctcagcccgcgcagaatgtgctcgctgccccgcggcttcgagccccaagctcccgaggacttggcgcagcggagtttggtggagctgcgggaaatgttgaagcgccaggagagacttttgcgcaacgaaaaattcatttgcaaattgcccgacaaaggtaaaaagatctttgactcttttgccaaactgaaagctgccattgcagaatgtgaagaagttagaagaaaaagtgaactgtttaaccctgttagtttagactgtaagctaaggcaaaaagcaattgcagaagttgatgtgggtacagataaggcccagaattctgacccgatacttgatacttcatcactagttcctggatgttcctctgtagataacatcaagtcatctcaaacctcacaaaaccagggacttggacgtcctactcttgaaggtgatgaagagacttcagaggttgagtacacagtgaataagggcccagcttccagcaatagagacagggtaccaccttcatctgaagctagtgagcatcacccgcggcatcgtgtttcaagtcaagcggaagatacttccagcagctttgacaacctgtttattgacaggttacagaggatcaccattgcggaccaaggtgaacaacagtcagaagaaaacgcaagtactaagaacttgacaggcctttccagtgggactgagaagaaacctcattacatggaagtgctagaaatgcgagccaaaaacccagtgccccagctgcgtaaatttaaaaccaatgtgttaccttttcgacaaaatgattcatctagtcattgccagaagagtgggtctcctatttcctcagaagagcggcggcgcagggataagcagcatcttgatgacatcacagcagctcggcttctaccacttcaccatatgcccacgcagctgctctccatagaagaatccttggcacttcagaaacagcagaaacagaattatgaggagatgcaagcaaagctcgcagcgcaaaaattagctgaaagactgaatattaaaatgcggagttataatccagaaggggagtcttcagggagataccgagaagtaagggatgaagatgacgattggtcctctgatgaattctgaagataatctcctaaatcactgacgttgagatgtcatcatcttacatcagactttctaactagtatcaagatcagtgtcagatattgttgagggaagtaattttataaagttacacaaaggtagttataaaaaaagcccagtttgtctttcagaaggtgactttcatgtgcttgaaaagtttaatatttgaatattgtgtttaaccacatggtattaaaattttgcaatatattgtgtattggtctgatattttagtatatagtagaacatactttttttttctttaagccaaatgaaaagaggtaactttgcttttttcctttttcttacctatcaaatagcatttattacatgtctttcagtgaaatacttagttgttccaggcacctaaaatcaattaggaagacatagttcccttcttttttgggtaatgaagggagcagtctaaagaattgtatgcatgtttgcatggggttattgagacattggatgtgaaatacctaggaagacatgtatggagaatgcttaacaaatgctcttctcctttttctgtcttcccttaggaagaacgttatctctcttctgattagggaaggacttcccttttgagtagatgctggaaagtggaggttttttttgttggtttgtttgtttggttttgtgtttttttttgagatggggtcttgctctgtcgcccaggctggagtgcagtggcaggatctcggctcactgcaatctaggtggaggtctttttaaataacctcatgttacttcaggcaaatctggtacaggagaagcccaagctaactgagctgggtgaaggcttgtgcatcacctggcttgagttccttgctgtcacagatgataggttcatgtacacaacattaatgtttgataaggaaagcattttttttttgttaaaattgaattgtcagtactttacttttttccccccaaataggtatatatagactgcagaagcttcagtcccatatataaacgttcatgtcattttagaggattatatggttgtctccagagaaattaacttacattatcaaaaaattctttgtctaatatattggagtctttaaaagtgttgaagaataaaatattaattagaacaacttcaaatgctaaggtgatgttttaccgggacttaattaaatacaactttttcctttcgaaaaagactgttcacatttgcttccaggtgtaattattgctttcattccttacccccctcaagcaaatgtgaaaagtatactgacctaagattctcattagttttagttcttaaaacgaatagtaaatgatttcacagcgtaaaatttgatgttatttctggaagctggatgatatggaagagttcatgtgcctggacacacagttccctgtaatcctgccatctagggagataaactctgttaacattttgatgttgtgtttttgcttatttttctatgcatagttatgcatttatattctcaaaaatgaaatcataatgtacattgctttgtagtctgctctatatattgtcaatatgttcccatattaaatattttgctttttagacagctgtaggatattttatttcatgggtataccataactttaagatttatttcctattcagcaatttgattatgtattataatgtaatctgtaaatagtgatatgattaacatcttaatcacatccatagaaaatgacttatttccagaagataccgctctaaaaatgaaattgttaggtgaaagtgtttttgagaatttttatatatattactcactgcagagatcatgttcatttacattcccattagcaatatatccaatgctcagaattgaaaattactacttaaaatctttgcaaattgaataattacagaaaagggctacatttaaaatttgtatttgtttttcttacttagtgaaggttgtgttttttttcatattcattggccatgctatattcattcttttgagaattgctcattcatattttttctgttgcttgcttggagaatttgctctttttttggcatataagttcttaagaatgtccgtcctttgtcatatattgtaactttttttagccttatttgtcatttaacatagtttgtggtatttcagtatagaagttgttttctttaggagtctacctttgtgtatgtgcttgaaagtatttttgtaatccaagaatggataaatgtccttattttcttctagtattttcttatttcacttttacacctatctttaaaaggaatttaaattttgtttatatacattaactaaatcagtacaagtttggggtgaaaaggaaatttttaatccatctcaaatgtatttggttatattatataaggtagggatttgattttatttcgaagaatttaccaattggttcagtatgtgaaaccaccatttcccctctgattagtaatgctatttttatagaatattaaattcttatgtgtcttttgtgtcttaggccaatttctgggccttctgggttttttctacactgtcaataattatcgctttaattggtgttaatatttggtagtacacaggttctcccttgttcttttaaattttgtgaaatataacttacaaataagtacttaaaacagagcttaatgggtaaagcaacagctgtgtaatcacaaactagatgcagaggaggtcttgccagcactccaaaatctctgtgtgtcccctcttgacactcactgtttcccccagagctaactatcctgacgtatggtaattctccctctgtccttttaagaattattttaccagttatgtgtataacaatatggtttacattttgctcacttttgacttatataaaaatagaataatactaaaaaaaaaaaa

SEQ ID NO: 20 - DNA, 573 bp, Homo sapiens
  CDS (61)..(213)
ggctgtgtaccaataaaactttatttatagacactggaattcgaatctcatatcattttcatgagtcacagaatcttcttcttttgctatttaaaagcaaaaataaaaattcttggctgggcacggtggcttgtgcctgtaatccctgcactttgggaggctgaagtgggaagatcatttgaggccaggagttcaagaacagcctgggcaacatagtgagatcctatttctacaaaaaataaaaaataaaataaaataaaattcttagttcatggtcaaaaacaggatttgctttgcggaacaccatttgcagtcccctatgctaacctatctaggtgcttaaaacagtacctaacaccctgttcttgggttggctttaaacaccaaccaaggatttaatacctgttagccatttcaggtggaaagatgtgaatgtggtatgaagtgggtcatctgtggcagttggcttgttggtgagggacaggccattggtaatggaagggtcagctctgtcttggaacagctgcccagagcatggcccgccatgctccccctcaacacccaaagtgacac

SEQ ID NO: 21 - DNA, 1358 bp, Homo sapiens
  CDS (291)..(887)
  misc_feature (1)...(1358): n = a,t,c or g
ttagttttgagggannnaggnnatttgatnnccatcgtagaccattaggccagngncgnggaattcgcctgctgttatccacataagatgtgacttgcttctccttgccttcagtcatgattgtgaggcttccccagccacgtggaactagggataaccaattggctggcaaagtaacaaatgaaaagtaacctgactctattgacctgcttaaccctgcatgggggggaaggatggaaaggagcagctgtttgctttgaaacggtggaacagttttgcagccttagaaaatggcatgtaacatacctaaccaaagacagcggactctgtcaacaacaggagaagctctatacgaaattcttggtctgcataagggagcatcaaatgaagaaattaagaaaacctacagaaaattggccctgaaacaccatccagacaagaatccagatgatccagctgctactgagaagtttaaagaaatcaacaacgcccacgcaatacttaccgacatttcaaagagaagcatatacgacaagtacggatcgctgggactctacgtggccgagcagtttggagacgaaaacgttaacacctacttcatgctgtcgagctggtgggcaaaggccctgtttgtcatcgttggcctcttgacgggctgctacttttgctgctgcctgtgctgctgctgcaactgctgctgtggacactgccggcccgagtcatcagtgccagaagaggacttctatgtgtccccagaggatctggaggagcagatcaagtctgacatggaaaaagatgtggactttccagtttttctccagcctacaaatgcaaatgagaaaacacagctaatcaaagaaggatctcgaagttattgcacagactcttgatattgagccctcagagagtccacagtccctcctctcagttcagtcttgtctccagatggtcgtaggggagcgtgtggggcataaagtgctgtgaacttttccatcttgttgttttatttttgggttaggaaaacatgattgctatataattttctcagtatgcagactttctctctgagtagaatttcttatgaaacacattcaatttgggtgaataaaggcctgaagagttattttaccctccttgcctgatgtaggacagtggaattgtacagcctttatgaacctgccctttatgtgtggcagatctgattcctaactgaccaaagtaatattccagaacaaaagccacttttcttacatttaacacaatattcatatctaccacgaacatgatcatcaaaatatatgagaacttataaagagtttttgtgtgtggagcctcttccgtgtcaatattcaataaag

SEQ ID NO: 22 - DNA, 2625 bp, Homo sapiens
  CDS (114)..(1526)
aggcttgcggccgcgggagctgaccctgcggggtcccggggggggagggggagccgcgaagcccccactgaggccgccgctgccgggcctcccctcccccccgggcgggcgccatgcgggggagcccgggcgacgcggagcggcggcagcgctggggtcgcctgttcgaggagctggacagtaacaaggatggccgcgtggacgtgcacgagttgcgccaggggctggccaggctgggcgggggcaacccagaccccggcgcccaacagggtatctcctctgagggtgatgctgacccagatggcgggctcgacctggaggaattttcccgctatctgcaggagcgggaacagcgtctgctgctcatgtttcacagtcttgaccggaaccaggatggtcacattgatgtctctgagatccaacagagtttccgagctctgggcatttccatctcgctggagcaggctgagaaaattttgcacagcatggaccgagacggcacaatgaccattgactggcaagaatggcgcgaccacttcctgttgcattcgctggaaaatgtggaggacgtgctgtatttctggaagcattccacggtcctggacattggcgagtgcctgacagtgccggacgagttctcaaagcaagagaagctgacgggcatgtggtggaaacagctggtggccggcgcagtggcaggtgccgtgtcacggacaggcacggcccctctggaccgcctcaaggtcttcatgcaggtccatgcctcaaagaccaaccggctgaacatccttggggggcttcgaagcatggtccttgagggaggcatccgctccctgtggcgcggcaatggtattaatgtactcaagattgcccccgagtcagctatcaagttcatggcctatgaacagatcaagagggccatcctggggcagcaggagacactgcatgtgcaggagcgcttcgtggctggctccctggctggtgccacagcccaaaccatcatttaccctatggaggtgctgaagacgcggctgaccttgcgccggacgggccagtataaggggctgctggactgcgccaggcgtatcctggagagggaggggccccgtgccttctaccgcggctacctccccaacgtgctgggcatcatcccctatgcgggcatcgacctggccgtctacgagactctgaagaactggtggcttcagcagtacagccacgactcggcagacccaggcatcctcgtgctcctggcctgcggtaccatatccagcacctgcggccagatagccagttacccgctggccctggtccggacccgcatgcaggcacaagcctccatcgagggtggcccccagctgtccatgctgggtctgctacgtcacatcctgtcccaggagggcatgcggggcctctaccgggggatcgcccccaacttcatgaaggttattccagctgtgagcatctcctatgtggtctacgagaacatgaagcaggccttgggggtcacgtccagatccttctgctgactgccagatccctgcatttcaagcactacgccttccacccccaggcactggatcccagattcccaagccttcacccaccagattctggctcctaaaacaagtgcgggggccccagtggcacagcaagtggatcctggcaactgcagctgctggattccagattctgggtccccaatccctctgcccagtccctcaatgttgaaacctcatctcttgaaggcagatcctgatattccaaggcactgaatcccaagccctgaatccccggtttctgatctgaatcttccaggcgccgggtcccaaatgttcaggccccaagtctagatcctggcagcccagtcacagagtatcccacacacactggtgcccagagccggcttctcatgacatgaaattgcatggtcgagggagtctgtggggaaggaagcccaggtcctggctgcaacctgcacggatgctggattccccctcaccccacctctgcatggccaccccctcccagccctgtggggaaactgttccctggaaccactccactccctgcatccccacacttcacagcatcttccatccccctcccaccttctaggcgaatagtccccagagctgtgttcctccaaggggtccgaggaatcactcactcctggaggctggcaaggagacagtctgaggccagggacacatgaagggatgtccccaccccagcactatcagggcctccccaggcttccagagttgaaagccaggagaaaatcggcaaagaccacccttccctaaacccaagcacccaatgatgcaaaaaacaaaaacaaaaaaaaaccaccaaatccccaaattcattccagatctatttttctaccagagagaggagcaaagtcctcctcccctgcgcccttacattctgcacttcatagttggattctgagcttaggatcatctggagaccccatggagggacttggaaaggggaactgggatttggggaggggctggaggacttccgcacgcttccacctccttcgacctccactgcgccccacctccctgcctgtgtgtgttatttcaaaggaaaagaacaaaaggaataaattttcta

SEQ ID NO: 23 - DNA, 1756 bp, Homo sapiens
  CDS (340)..(831)
atttcctgcctctacccatcaactccttataaagagccccatgagctaagactaaggagaggatcatgtcccttgggcgtgtgcccatgtctgggagaagaaatatacaccactgaacaccgagcacatgggagagggaagggacaccacaggagagagagaggcagataccccaagaggtggatgggccgagctcccagccaaccctgaaggaggcactgcttccaggggttcttaaaaaagaagaaaatcatacaaccaaagggggaggggacaggtagagggcgaggagttgtcccatttatacacaacattgtaaacatacacggtctatattacatgtgcttcagtctggtgtttgcatgtctgtctgtccgtctgtcagtatgggggctggatcttaggagccgtgccccactactcccccaacccccacctccctgccccaccctgggaacagagctggaacaggtatggcccccaaaccataggtgggagccagcaggtagtgcctgggccacagcctctactctggctccagagtcctgcgtgtgtaaatgtgtgtgtgtgtacgcatgtttgagtatgtgcatgtatgtacatggggaacctgtgtgcaagtatgtacaaagggagacggtcactgtcacagaggctgggggcaggtggggctgctggaggcgaggcctgcctggggcagatagctcacaagtagatcctccgcaggtctccgggcgctgtgatcgtgttgcactgagggcagagcttcttggcacccagggtccgcagccagcactcctcgcagtgcacgtgccaacactggatggacgttaggggcatcgagtacgagtccatgcagatgaggcatttgtaacggtccccacgagatagctgccgttcaagttctctgacccgagccttcagagcctcaaacgtggtcacagctgaatcttcggtgattttctcgatgtcgctgttcttgcaggtcttctgcatggcctcctgcttgctgctttcaccattgctggtggatggcatctcatcactggcccatttagagaactcaggtgtgatgcgcgtgctgggagggccgccatttaggactgcgccccgaagtgcctctctctccttggcttcaccaggctcctcgcctgtgcaggggatgacatcagcctctgtgtattgtggcttcccatactccagagtgtcatccccatccacatccaagtcagcatcactgtccgggttctctttgccgctgcacatgatgaagccagagcctcggaagccaccttccaggagagtggtggcccgtatccgcttctgtccacaccactcatactcctcaaagcggttgttgttctcatgctcgatgtccacagcatcatcctcagccatgcaggagccttccctctgtgaagagcagagcaggatcatgctgggcccaggccatccccacctgctccccacagtctgcaacgaaggcacagctctagccccagctgtggtgtgccaagtgggccctcagctctagggctcctttgaagcaaaccaatttagaggtcaaagacctgggcctcttcccaatagttttccgctggagcccaaggagggaatgagtgagagtgaaagcaaaaggagagagcagtggtcagaagggaagaagctgctgagaccacatggagaccccaagagcccacagattcaggggcagtcagcagctagtgtcgggggaagggagcggggaaggaaggtg

SEQ ID NO: 24 - DNA, 2313 bp, Homo sapiens
  CDS (155)..(931)
gcgcgggatctcgagctgggatcgccctcctgggcttcggtgcgatcggcggcgggaggttccctgggaaccaggtggtcgaagggctgagctgtgtggccagacaagaggtccctgccctcccccagtgagccctgctgttcccgtgggagccatgaagctgaacgagaggagtgtagcccactatgcactcagcgactccccagcggaccacatgggcttcctgcgcacctgggggggcccagggaccccaccgacccccagtggcactggccgaagatgctggtttgtcctcaagggcaacctgctattctcctttgagagtcgcgagggccgggccccactgagcctggtggtgctggaaggctgcacagtggaactggccgaggctcccgtgcccgaggagtttgcctttgccatctgctttgatgcccctggagtgcgcccacacctgctggccgcagaagggccggcggcccaggaggcctgggtgaaggtgctgtcccgggcaagctttggctacatgcgcctggtggtacgcgagttggagagccagttgcaggacgcacgccagagcctggctttgcaacgccgctcatcctggaagtttgttgccagccgctgtaagccccaggctcctaaccaccgagctgcgggcctggagaatggccactgcctctccaaggacagcagccctgtgggcttggttgaagaagggggcagcaggtctgcagggtgggggttggctgagtgggagctgcagggccctgccagcctcctcctaggcaaggggcagagccctgtgtcccctgagacctcctgcttctctaccctgcatgactggtatggccaggagatcgtggagctgcggcagtgttggcagaagagggcccaggggagccactcaaaatgtgaggaacaggataggccctaagtctgggccctttgagtcaggaaaccagggccagttctttttcaggagttaaatgtttacgcatttccaaggttgcgttttgggaggggacatgggttctctccttcctgctatttaggcattctccaggttcgagatccacccgtgtgtctggaagggactgcgggaccattccttccatcctctttatttcctgaggtccagagaaggaaggagacttagcagccacagagcaagaccccaatctcctgactgcactggcctgactgccccctcccaggggatgttaatgaaatgaaggaagtggggaatgtcacccgagactgtcacaggcttgccatacctttggcctacacaccgggctctagagccataatttccaacctggggagtctcctgtgcacttaaatccgaggtaggctgcagtatcggcttgaagctctgacactgtcagagaaagtggatttattgtgtcataggagtttctgggacccagctcttcctgagaggggtgggaagattggggatgggatcctcactcagcagtctgggtagggccctttgaggcagagggtcttcggccagtgaagagagatttattctgctcagagtgctggggtcccatcctttctccctggctgccctgttaacagatggtgctggaccttgccccggaaggggcttgtagcttttttacgtcaacgaaatgccctcctgtactctgtcttcagcagccaactcctggagctgccaagtgaggggttaaagaagaggtggggaggcagtgtggctccctgggaaaagtctgttgctttggttctcagtcctgggtattctaggagcttggacacgggattgcgtttcctgtgctaaaattctctctcctggctgggctccggtaaactgaagctgctcgagaaatcacctgggaactctcatagccgtttgtcacccagggtgtacttgccaggacctctccttgctactcttcccaaagtcgggaggcaaagcggctgggtcaccagagcctgaccatactgacgctccagggggaagacgcagaggccgggaagagacaccccctcccaaacacataaaacttgccccttcctagcctcggctcccctcactggggccttgggcaggaccgacccgcatccaactaggcctaaggggtaggctctgagcctcttacccctaagaggcggagatgcgcccaaggcgggcgcccggcctgttccccagccctgcctggaagccccgcagccactgcattttgtttaaacacagatagcacgggcctttctcttattgctacagtgttttgtacacggttaaaacactagtaaagctttttcgttattaaaaaaaaaaaaaaa

SEQ ID NO: 25 - DNA, 830 bp, Homo sapiens
  CDS (136)..(276)
tcgcgatctagaaccccccatactccttacactattcctcatcacccaactaaaaatattaaacacaaactaccacctacctccctcaccaaagcccataaaaataaaaaattataacaaaccctgagaaccaaaatgaacgaaaatctgttcgcttcattcattgcccccacaatcctaggcctacccgccgcagtactgatcattctatttccccctctattgatccccacctccaaatatctcatcaacaaccgactaatcaccacccaacaatgactaatcaaactaacctcaaaacaaatgataaccatacacaacactaaaggacgaacctgatctcttatactagtatccttaatcatttttattgccacaactaacctcctcggactcctgcctcactcatttacaccaaccacccaactatctataaacctagccatggccatccccttatgagcgggcgcagtgattataggctttcgctctaagattaaaaatgccctagcccacttcttaccacaaggcacacctacaccccttatccccatactagttattatcgaaaccatcagcctactcattcaaccaatagccctggccgtacgcctaaccgctaacattactgcaggccacctactcatgcacctaattggaagcgccaccctagcaatatcaaccattaaccttccctctacacttatcatcttcacaattctaattctactgactatcctagaaatcgctgtcgccttaatccaagcctacgttttcacacttctagtaagcctctacctgcacgacaacacataaaaaaaaaaaaaaaa

SEQ ID NO: 26 - DNA, 1484 bp, Homo sapiens
  CDS (627)..(1046)
aatgcttttttttttttttttttctttccattttttattaattgaagcacagagaaaagaggcaaaatgattaaagaaatttatgttttttagacagggtgttggctttacaccaacgaaaaagaaaaacagatgaataagcttttgatcttcattttctttctcttattctcatggtaggctgagatgcttttaaatgtgatgttataagcctaaggcagcttgacttgcagcaacaagttttttaccctcctcggcaaagcaggtctccttatcgtcagccttgcagcacttctctacaaaagctgcgaaatcatccataacagctttcagttgctcttttgttgccttgggcttgtgtttcacaagctcaacaagtgcagtttgtttcttgatttgtctctccttctcagaaagtgtgcatatatctgcatggaaggtgaatgtttcagcattaaactctttgggaacgtatgtttcatcgacttccagagctgaaaagcatggtcgcctgttcaccaaggattctgtgcagcatttggtgactctgtcacttactggcgttttctcatgcaacacacataactggttcaggaccacggatagatagtcttctgcacagggcattctttttgcttcaggatgtttacaacatttgctgcccacttttcctaggtttcttgagacctctacaaaattgtgagctttttgagcagcttggagagtacaaattccagaatgcgctattagttcggttacaccaagaaagtaccccaagtgtcaactccaactcttgtagaggtctcaagaaacctaggaaaagtgggcagcaaatgttgtaaacatcctgaagcaaaaagaatgccctgtgcagaagactatctatccgtggtcctgaaccagttatgtgtgttgcatgagaaaacgccagtaagtgacagagtcaccaaatgctgcacagaatccttggtgaacaggcgaccatgcttttcagctctggaagtcgatgaaacatacgttcccaaagagtttaatgctgaaacattcaccttccatgcagatatatgcacactttctgagaaggagagacaaatcaagaaacaaactgcacttgttgagctcgtgaaacacaagcccaaggcaacaaaagagcaactgaaagctgttatggatgatttcgcagcttttgtagagaagtgctgcaaggctgacgataaggagacctgctttgccgaggagggtaaaaaacttgttgctgcaagtcaagctgccttaggcttataacatcacatttaaaagcatctcagcctaccatgagaataagagaaagaaaatgaagatcaaaagcttattcatctgtttttctttttcgttggtgtaaagccaacaccctgtctaaaaaacataaatttctttaatcattttgcctcttttctctgtgcttcaattaataaaaaatggaaagaatctaaaaaaaaaaaaaa

SEQ ID NO: 27 - DNA, 1289 bp, Homo sapiens
  CDS (204)..(725)
taagcttgcggccgcggcgcggggctcccttcctcgtgctcggcgttgagctcctgcagccgccgccgctgcagtggtcgtccctgccctccccggccccggggtgcaccccgcaaggctcccgctggtgtccctggagcatgggaggctgctgagcgtgagtggcggtgtctggcaggagctgcgtggcagggagggcgtccatggctgcagccaacaagggcaacaagcccagagtccggagtatccgctttgcggcaggccacgatgcagaaggatcccacagccacgtccactttgatgagaagctgcatgactcggtggtcatggtcacccaggagagtgacagcagctttctggtcaaggttggcttcctgaagatcctgcacaggtatgagattaccttcactctgcccccagtgcacaggctgagcaaggatgtccgcgaggcacctgtccccagcctgcacctcaagctcctcagcgtggtgcccgtccctgaaggttatagtgtcaagtgtgagtactcggcgcacaaagagggcgtcctcaaagaggagatactgctagcctgcgaaggtggcactggcacctgtgtgcgcgtgacggtgcaggcccgcgtcatggaccggcaccacggcacgcccatgctgctggatggtgtcaagtgtgtgggcgccgagctggaatacgactcagagcacagcgactggcacggctttgactgaggcccgaggccccgcctgccccgggcccctcagccttaaaccccgccttgtccccccgacatgctgcgtgatggtgtggcttcctcgcccctctctggggtgggtgtgggggtggagtggccttgcccacgcctctcacctctgccttcatttgtgctgccaccctgcccctccctcgtcctcctctcccacttcctcctctctgtgtgcctcagtctcctgccggaagaaatgggttgagcccgaaaggaggctgtctgaggaagggagagggagggcctggggtgggtcccccactccccaccccaagccacagggactcccaccagggtctgggagaggacggagctggctctgtggcgtcgtggccccattactgctgccttgcttcagccacctctcctgcccctccctagtccccactgctgtccaccatgagtaggagggaggtgcagtccccagcccccacccctcaggtctgtgttacttggtttttaagcgactggttgggatagaaccctaaagaaataaacttccagtggataccggaaaaaaaaaaaa

SEQ ID NO: 28 - DNA, 2632 bp, Homo sapiens
  CDS (590)..(1297)
cggggcatgctgcttcccttcaccttccaccatgattgtaagtttcctgaggcctccccaggtgtgcttctgtacagcctgtggaatgttaccaaagacgttggaagaggtggctatgggacatcacctgggagaagtggaagcaaatggacactgttcagaagtccatatacagaaacatacttggaaaaatatagaaacctggttttgctagatgggaagcttgaacgtggggccaagacatcaagagtagagcagcaggacatttcaaaagaagattaatctcaaagattagagatggaagaacttgcaaagagaaagtctgtaccggaagaaatctggaaatctagaggccagtttaagaatcagcagctaaacaaggagaataatctagggcaagagatagctacctgcacaaaaattcctaccagaaaaagagacatagaatctaatgaatttgtgaaaaattttactgtaagatcaatacttgttgcagaacagatagatcctatggaagagaattgtcataaatatggtacatgttgaaagatgctcaaacaaaactcagatttaattatacaaagaaagtatgatggaaaaaaaaaaaccttgtaaatatagtgaatgtgggagaaccttcagaggccacatcactcttgttcagcatcaaataactcattgtggagagagaccctgtaaatgtactgagtgtagaaagggatttaatcagagttcccacttaagaaataatcagagaaaaactctttcaggagaaaagccctacaaatgcagtgagtgtgggaaggccttcagttattgcttagttcttaatcaacaccagagaattcacagtggagagaaaccttatgagggtactgaatgtggcaagacattcattcagtcgtacataccttactcagcatcaaagaattcacacactggtgagaagccctatacatgtcttgaatgtggaaggctttttagtcagaacacacatcttactctacatcagagaatccatactggagagaaaccttatgaatgcaatgaatgtggtaggtcctttagtcagactgcacatcttactcaacatcaaagaatgtatacaggagaaaaactctatgaatgtaatgaatgtgagaaagccttccatgatcactcagctcttattcaacatcatattgtccatactgcagagaaaccctatgaatatcatgactgggaaaactttcagttactgttcagacctcattcaacatcagagaatgcacactggagagaaaccatacaaatgcaatgaatgtgggaatgcctttagtgattgttcatcccttattcagcatcaaagaactcacaccggagaagagccttatgaatgtaagcaatgtggaaaagcctttagcagaagcacataccttactcaacatcagagaagtcacgcaggagagaaacagtataaatgcaatgaatgtgagaaaactttcagcctgagttcattccttacacagcatatgagggttcagactggagaaaaaccctacaaatataatgaatatggaaaagcttttagtgactgctcaggacattttcagagaactcacactggagagaagccctgtgaatgtaatgactgtgggaaacctttcagtttctgttcagccctaattcaacataagagaattcataccagaaagaagccctgactgtaccttcataccagtaaatgcactgactgtggaaaagccttcagtgattggttagcacttgttcaacatcagataactcaacactggagaaaaaccgtataaatgtactgaatgtggaaaagccttcagttggagtacagacctcaaaaatcaccagaaaactcatactagtgaaaaatcctataaatgtaatgaatgtagaaaggcctttagttactgctctggtcttattcaatgtcaggtcattcatactatagaaaaaccttatgaatacggtaaatgtggcaaagcctttaggcagaggacagaccttaaaaaacatcagaaaatgcataccgaagagaaaccctatgaatgtaatgaatgtgggaaagcctttagccagagcacatatcttacaaaacaccaaaaaattcatagtgaagagaaatcaaatatacatactgagtgtggggaaaccattagacaaaactcttcttttttacaacaataaaacctcacactggagagattctctgaatgccttaagaatttggttaatatggagacccttcccagggaaacagaaggaggatcgtgaaaactgttgactacttagaatgatcacatggtttagtggagagagcatgattctgggttttaaaagtcatggatctcaatctcagctcctattactaactagatcttttactttggggtaagtcacttcatatctttaggccttaatttcctcatctgaaaaactggaaggcctgacttgttgagctttaagatcctcaattattatatttactaggaattcaagtttctatagatgtggttcagaattgtgacttatttattgtacatcaggtgtgattcacaagtgagcttgtagtagttattaaggagtcaataaagatatgatatagagcaaaaaaaaaaaa

SEQ ID NO: 29 - DNA, 1108 bp, Homo sapiens
  CDS (29)..(625)
tgccgggtgaaatcgtaggacagtgaagatgctgctggaattgtccgaggagcataaggaacacctggccttcctgcctcaagtggacagcgcggtggtcgccgagtttgggcggattgctgtggaattcctgagacgcggcgcaaacccaaaaatctacgaaggcgccgccagaaaactcaatgtgagtagtgacactgtccagcatggtgtggaaggattaacgtatctcctcactgagagctcaaagctcatgatttctgaactggatttccaagactctgtttttgttctgggattctctgaagaattaaacaaattgttgcttcagctttatctggacaacagaaaagagatcagaacgcttctgagtgaattggcaccaagccttcccagttatcataaccttgaatggcgactagatgtacagcttgcaagtagaagtctcaggcaacagattaaaccagcagtgactataaagctacaccttaatcaaaatggagatcacaacaccaaagttctgcagacagacccagccaccctgctccatttggttcaacaactggaacaagcattggaagagatgaagacaaatcactgtaggagagttgttcgcaacatcaagtagtaccagttttaaggttttaattcatttgaatcacttatgaattgatgatatacagcaattacttttcaaaattaattttttattaattcatgatgataaatacatagtattcctcagtatctattccaagatactgaggtcataatcagaagctaagctgggtgcagtggctcatgccagttatcccagcactttgggaggccgaggtgggcaaatcatgaggtcaggagattgagaccttcctggctaacatggtgaaaccccatctctactaaaaatataaaaaattagccaggtgtggtggcacgcatctatcagagtcccagctactcaggaggctgaggcaggagaatcgcttgaacctgggaggtggaggttgcagtgagctgagattgtgccactgcactccagcctgggtgacagagtgagactccatctcaaaaataataataataataataaagtaaaaaaaaaaaaaaa

SEQ ID NO: 30 - DNA, 1022 bp, Homo sapiens
  CDS (175)..(864)
cgcctccgccccatccccaggggccgcctcccccggggcggcctccaggctgccgagacctataaaggcgccaggttttctcaatgaagccgggacgcactccggagcgcactgcgtggtcgcaccctacccgggctgccttggaagtcgtccccgccgcccctccgcaccggcatgaagctcatcgtgggcatcggaggcatgaccaacggcggcaagaccacgctgaccaacagcctgctcagagccctgcccaactgctgcgtgatccatcaggatgacttcttcaagccccaagaccaaatagcagttggggaagacggcttcaaacagtgggacgtgctggagtctctggacatggaggccatgctggacaccgtgcaggcctggctgagcagcccgcagaagtttgcccgtgcccacggggtcagcgtccagccagaggcctcggacacccacatcctccttctggaaggcttcctgctctacagctacaagcccctggtggacttgtacagccgccggtacttcctgaccgtcccgtatgaagagtgcaagtggaggagaagtacccgcaactacacagtccctgatccccccggcctcttcgatggccacgtgtggcccatgtaccagaagtataggcaggagatggaggccaacggtgtggaagtggtctacctggacggcatgaagtcccgagaggagctcttccgtgaagtcctggaagacattcagaactcgctgctgaaccgctcccaggaatcagccccctccccggctcgcccagccaggacacagggacccggacgcggatgcggccacagaacggccaggcctgcagcgtcccagcaggacagcatgtgagcgtttccctatgggggtgtctgtacgtaggagagtggaggccccactcccagttgggcgtcccggagctcagggactgagccccaagacgcctctgtaacctcgctgcagcttcagtagtaaactgggtcctgtttttttaaaaaaaaaaaaaa

SEQ ID NO: 31 - DNA, 1528 bp, Homo sapiens
  CDS (281)..(1525)
ggaagaattgaaaagtgactacaattaaagaccttagtatgatttagggaaaaaaggctggggtcagttacctttctctcttaaggagattccttgatgatatggttcttcctctccagctgtgatcccacttacagattcagagtataagctgctgcccttgcactttgctgtggaccctggaaagggctgggagtggggcaaagatgatagtgacaatgtccgattggccagtgtaattctgtccctagaggtcaaattgcatctgctgcatagctacatgaatgtgaagtggatcccactgtcctctgatgcacaggctcctctggcccagcctgagtcccccaccgcctcagctggagatgagccccggtccactcctgagtctggagactcagacaaggagtcagttggcagcagttccaccagcaacgagggcggccggcggaaggagaagtcaaagcgagatcgggagaaggacaagaagagagcagattctgtggctaacaaactgggcagctttggcaaaaccttgggcagcaagctcaagaagaacatggggggcctgatgcacagcaagggttcaaagcctggaggggtggggacagggttgggaggaagcagcggcactgagacactggaaaaaaaaaaaaaaaactcactgaagagctggaagggtggcaaggaggaggcagctggggatgggcctgtgtctgagaagcccccagctgagtctgttggtaacggagggagcaagtatagccaggaggtgatgcagagcctgagcattctgaggactgccatgcaaggggaggggaagtttatttttgttggaaccctgaagatgggtcaccgtcaccagtatcaggaggaaatgatccagcgctacctttctgatgctgaggagagattcctggcagaacagaagcagaaggaggcagagaggaagatcatgaatggaggaatagggggtggccctcctccagccaaaaagccagagccagatgctagggaagagcagccgaccggtcccccagcagagtccagggcaatggcattttccactggctaccctggggactttactatccctcggccgtctgggggcggagtccactgccaggaaccccggaggcagttggcagggggtccatgtgtcgggggcctaccaccatatgccaccttccccagacagtgccctcctgggcgaccctacccccaccaggacagcatcccttctctggagccaggcagccactctaaggatggacttcacaggggtgccttgttaccacccccctaccgagtggctgattcctatagcaatggctacagagagccccctgagccagatggatgggctggaggtctccggggccttcccccaactcagaccaaatgcaaacaaccgaactgcagcttctatggacaccctgagacaaacaacttctgttcctgttgttacagggaagaactgaggaggagggagcgggaaccggatggggagctcctggtgcacaggttctga

SEQ ID NO: 32 - DNA, 2537 bp, Homo sapiens
  CDS (199)..(1890)
aaggatccttaattaaattaatctcccccccccccccccgccccactctggactcccgcgctgggcgcgctgaggcggcccccgagcgagcgcgcgtgcagccgccgccgccccgagcacccgcagctccggcgccgcggcgagacggagacggaccgagccacgggcccccgcggccgcagcatctcggaggagaacatgcttgccaactcagccagcgtgaggatcctcatcaagggaggcaaggtggtgaacgatgactgcacccacgaggctgacgtctacatcgagaatggcatcatccagcaggtgggccgcgagctcatgatccctggcggggccaaggtgattgatgccacaggaaaactggtgatccctggtggcatcgacaccagcacccacttccaccagaccttcatgaatgccacgtgcgtggacgacttctaccatgggaccaaggcagcactcgtcggaggcaccaccatgatcatcggccacgtcctgcccgacaaggagacctcccttgtggacgcttatgagaagtgccgaggtctggccgaccccaaggtctgctgtgattacgccctccacgtggggatcacctggtgggcacccaaggtgaaagcagaaatggagacactggtgagggagaagggtgtcaactcgttccagatgttcatgacctacaaggacctgtacatgcttcgagacagtgagctgtaccaagtgttgcacgcttgcaaggacattggggcaatcgcccgcgtccatgctgaaaatggggagcttgtggccgagggtgctaaggaggcactggatttggggatcacaggcccagaaggaatcgagatcagccgtccagaggagctggaagctgaagccactcatcgtgttatcaccattgcaaacaggactcactgtccaatctacctggtcaacgtgtccagtatctcggctggtgacgttatcgcagctgctaagatgcaagggaaggttgtgctggcggagaccaccactgcacatgccacgctgacaggcttacactactaccaccaggactggtcccacgcggctgcctatgtcacggtgcctcccctgagactggacaccaacacctcaacctacctcatgagcctgctggccaatgacactctgaacatcgtggcatcagatcaccggcctttcaccacaaagcagaaagctatgggcaaggaagacttcaccaagatcccacatggagtgagtggcgtgcaggaccgcatgagcgtcatctgggagagaggagtggttggaggaaagatggatgagaaccgttttgtggccgttaccagttccaacgcagctaagcttctgaacctgtatccccgcaagggccgcattattcccggagccgatgctgatgtggtggtgtgggacccagaagccacaaagaccatctcagccagcacgcaggtccagggaggagacttcaacctgtatgagaacatgcgctgccacggcgtgccactggtcaccatcagccgggggcgcgtcgtgtatgagaacggcgtcttcatgtgcgccgagggcaccggcaagttctgtcccctgaggtccttcccagacactgtctacaagaagctggtccagagagagaagactttaaaggttagaggagtggaccgcactccctacctgggggatgtcgctgttgtcgtgcaccctgggaaaaaagagatgggaaccccactcgcagacactcctacccggcccgtcacccggcatgggggcatgagggaccttcacgaatccagcttcagcctctctggctctcagatcgatgaccatgttccaaagcgagcttcagctcggatcctcgctcctcccggaggcaggtcgagtggcatttggtaaaggcattgccaagccccccgagtgaggacgcaccgccgccaccagcccgcaactctccagccgaagctgcaggggcaggagaggctgggctgggtggcacaccacccgaggggggccccgggacccacggagccctccctatgtctgcaaagtgattcactgtgcttcgagccaactctaacaggcactttgagatgtgttcctcctgctgtagtcctttctgccttggcctcggcgggcttttctggggcccaggaagcccacactatgcacagagcccaatgcatagagccctggccagcccttcctctcactcctgcctccgctggctttgggaaagcccagactttagtgccctgccccctggctgactggccagttgcccagagcactttagcagatgtggtttcaaagtaaaggcctcctcccccaccccttaggccccgtggtgacatttcccaagtcagacagatgtcagcttcccagccatgcccaggacgtcctatctcccccaacccacctctggccctgtgtaggggcagggatgggggtggctgggactcctggtgcccctcgccagcttctcctgcgccccgcccacaccctcgggggggtcacaggcccagaagggtagctgggcgggg

SEQ ID NO: 33 - DNA, 1409 bp, Homo sapiens
  CDS (56)..(1219)
tctgcaccttcctcccgtcttgccttctccctcgagttgggacccgggaagaaccatgaagtggctgctgctgctgggtctggtggcgctctctgagtgcatcatgtacaaggtccccctcatcagaaagaagtccttgaggcgcaccctgtccgagcgtggcctgctgaaggacttcctgaagaagcacaacctcaacccagccagaaagtacttcccccagtgggaggctcccaccctggtagatgaacagcccctggagaactacctggatatggagtacttcggcactatcggcatcggaactcctgcccaggatttcaccgtcgtctttgacaccggctcctccaacctgtgggtgccctcagtctactgctccagtcttgcctgcaccaaccacaaccgcttcaaccctgaggattcttccacctaccagtccaccagcgagacagtctccatcacctacggcaccggcagcatgacaggcatcctcggatacgacactgtccaggttggaggcatctctgacaccaatcagatcttcggcctgagcgagacggaacctggctccttcctgtattatgctcccttcgatggcatcctggggctggcctaccccagcatttcctcctccggggccacacccgtctttgacaacatctggaaccagggcctggtttctcaggacctcttctctgtctacctcagcgccgatgaccagagtggcagcgtggtgatctttggtggcattgactcttcttactacactggaagtctgaactgggtgcctgttaccgtcgagggttactggcagatcaccgtggacagcatcaccatgaacggagaggccatcgcctgcgctgagggctgccaggccattgttgacaccggcacctctctcctgaccggcccaaccagccccattgccaacatccagagcgacatcggagccagcgagaactcagatggcgacatggtggtcagctgctcagccatcagcagcctgcccgacatcgtcttcaccatcaatggagtccagtaccccgtgccacccagtgcctacatcctgcagagcgaggggagctgcatcagtggcttccagggcatgaacctccccaccgaatctggagagctttggatcctgggtgatgtcttcatccgccagtactttaccgtcttcgacagggcaaacaaccaggtcggcctggcccccgtggcttaagcctaagtctcttcagccacctcccaggaagatctggcctctgtcctgtgcccactttagatgtatctaattctcctgactgttcttcccaggggagtgtggaggtcttggccctgttccctgtcctaccaataacgtagaataaaaacataacccactgaaacaggttttgtggaaaaaaaaaaaa

SEQ ID NO: 34 - DNA, 2800 bp, Homo sapiens
  CDS (130)..(2592)
ggtcgctaggacttccgtcgcatttcgtgactttcaggacggtggggcacagcgtgtgatgacggctggaacagtaaagctgcagctgtggtgtgtagccagctggactgcccatcttctatcattggcatgggtctgggaaacgcttctacaggatatggaaaaatttggctcgatgatgtttcctgtgatggagatgagtcagatctctggtcatgcaggaacagtgggtggggaaataatgactgcagtcacagtgaagatgttggagtgatctgttctgatgcatcggatatggagctgaggcttgtgggtggaagcagcaggtgtgctggaaaagttgaggtgaatgtccagggtgccgtgggaattctgtgtgctaatggctggggaatgaacattgctgaagttgtttgcaggcaacttgaatgtgggtctgcaatcagggtctccagagagcctcatttcacagaaagaacattacacatcttaatgtcgaattctggctgcactggaggggaagcctctctctgggattgtatacgatgggagtggaaacagactgcgtgtcatttaaatatggaagcaagtttgatctgctcagcccacaggcagcccaggctggttggagctgatatgccctgctctggacgtgttgaagtgaaacatgcagacacatggcgctctgtctgtgattctgatttctctcttcatgctgccaatgtgctgtgcagagaattaaactgtggagatgccatatctctttctgtgggagatcactttggaaaagggaatggtctaacttgggccgaaaagttccagtgtgaagggagtgaaactcaccttgcattatgccccattgttcaacatccggaagacacttgtatccacagcagagaagttggagttgtctgttcccgatatacagatgtccgacttgtgaatggcaaatcccagtgtgacgggcaagtggagatcaacgtgcttggacactggggctcactgtgtgacacccactgggacccagaagatgcccgtgttctatgcagacagctcagctgtgggactgctctctcaaccacaggaggaaaatatattggagaaagaagtgttcgtgtgtggggacacaggtttcattgcttagggaatgagtcacttctggataactgtcaaatgacagttcttggagcacctccctgtatccatggaaatactgtctctgtgatctgcacaggaagcctgacccagccactgtttccatgcctcgcaaatgtatctgacccatatttgtctgcagttccagagggcagtgctttgatctgcttagaggacaaacggctccgcctagtggatggggacagccgctgtgccgggagagtagagatctatcacgacggcttctggggcaccatctgtgatgacggctgggacctgagcgatgcccacgtggtgtgtcaaaagctgggctgtggagtggccttcaatgccacggtctctgctcactttggggaggggtcagggcccatctggctggatgacctgaactgcacaggaatggagtcccacttgtggcagtgcccttcccgcggctgggggcagcacgactgcaggcacaaggaggacgcaggggtcatctgctcagaattcacagccttgaggctctacagtgaaactgaaacagagagctgtgctgggagattggaagtcttctataacgggacctggggcagcgtcggcaggaggaacatcaccacagccatagcaggcattgtgtgcaggcagctgggctgtggggagaatggagttgtcagcctcgcccctttatctaagacaggctctggtttcatgtgggtggatgacattcagtgtcctaaaacgcatatctccatatggcagtgcctgtctgccccatgggagcgaagaatctccagcccagcagaagagacctggatcacatgtgaagatagaataagagtgcgtggaggagacaccgagtgctctgggagagtggagatctggcacgcaggctcctggggcacagtgtgtgatgactcctgggacctggccgaggcggaagtggtgtgtcagcagctgggctgtggctctgctctggctgccctgagggacgcttcgtttggccagggaactggaaccatctggttggatgacatgcggtgcaaaggaaatgagtcatttctatgggactgtcacgccaaaccctggggacagagtgactgtggacacaaggaagatgctggcgtgaggtgctctggacagtcgctgaaatcactgaatgcctcctcaggtcatttagcacttattttatccagtatctttgggctccttctcctggttctgtttattctatttctcacgtggtgccgagttcagaaacaaaaacatctgcccctcagagtttcaaccagaaggaggggttctctcgaggagaatttattccatgagatggagacctgcctcaagagagaggacccacatgggacaagaacctcagatgacacccccaaccatggttgtgaagatgctagcgacacatcgctgttgggagttcttcctgcctctgaagccacaaaatgactttagacttccagggctcaccagatcaacctctaaatatctttgaaggagacaacaacttttaaatgaataaagaggaagtcaagttgccctatggaaaacttgtccaaataacatttcttgaacaataggagaacagctaaattgataaagactggtgataataaaaattgaattatgtatatcactgttaaaaaaaaaaaaa

SEQ ID NO: 35 - DNA, 858 bp, Homo sapiens
  CDS (93)..(611)
agccgcgtgagatccgcgcgggtgctagctagtcctttctcgtcgctgctcggctcgcggcccgtggggtcggccccgccaccgttgccgccatgcccatgaagggccgcttccccatccgccgcaccctgcaatatctgagccaggggaacgtggtgttcaaggactccgtgaaggtcatgacagtgaattacaacacgcatggggagctgggcgagggcgccaggaagtttgtgtttttcaacatacctcagattcaatacaaaaacccttgggtgcagatcatgatgtttaagaacatgacgccgtcacccttcctgcgattctacttagattctggggagcaggtcctggtggatgtggagaccaagagcaataaggagatcatggagcacatcagaaaaatcttggggaagaatgaggaaaccctcagggaagaggaggaggagaaaaagcagctttctcacccagccaacttcggccctcgaaagtactgcctgcgggagtgcatctgtgaagtggaagggcaggtgccctgccccagcctggtgccattacccaaggagatgagggggaagtacaaagccgctttgaaagccgatgcccaggactaaggcccccggtccctgtgggctggggtgatggtgtctgaccagtggggagattggaatgggattactttggcccagggaagcccctggttctgtccctggagactctggaaatccttttgcattaaaaggactttacacacctgtgtaaaaggatgtgggagaggagggtctgaagctgagctgctaaatgaatatccctgctctgctggtcaataaaacgcttcctaatagcaaaaaaaaaaaa

SEQ ID NO: 36 - DNA, 1131 bp, Homo sapiens
  CDS (336)..(632)
ctcccaaaatgttgggattacagggacaagcctctgcacctggccaaggattgttttttaagtgagactgagacccagccttattagtggtcccagagcagacctgggacctgaagggaacccttttcttctggtccagcgtctttcctctgatgggctactttcctggagcctttgattgcctgtcatcagagtaactgagtttgaacagagtaggtaattcctctccagaccaccacactcaccagctttcattctgcttctctcgtttagactgtggttctgaatcctcagttctatttactgagtgtttttaaacataaaaatgccttttaatgagattgaaggccagaggtgggacagttgaggacaaagtagaaataaaaccctcaaggcggggttgttggtgggagtctttttttgtttgtttgttttttgagacagagtcttactctgtcatccaggctggagtgcagtggcacaatctcagctcactgcaacctccgcctcccgagttcaagctattctcctgcctcagcctccttagtagctgggatttcaggctcccgccaccatgcccagctaatttttgtatttttagtagagacagggtttcaccatgttggccaggctgatctcgaactcctgagatcgggcagattgcttgagcccaggagttcacaaccagcctgggctggtaaaaccccgtgtctattaaaaaaacaaacaaaaaacaaacaataagctagcagagtgtttcctgtttcaggcctgctatgagagaggcgaggaagtcagtgtagtgcccaaaacatctgcttccactgactccccctggatgggtctcgcaaaatatgcctggtctgggtatgtgatcgaatgtcctagctgtggcgtggtctatcgtagtcggcagtactggtttggaaaccaagatcctgtggatacggtggtgcggacagagattgtgcatgtgtggcctggaactgatgggtttatgaaggacaacaacaatgctgcccagcgcctgttggacgggatgaacttcatggctcagtcggtgtccgagcttagccttggacccaccaaggctgtgacttcctggctgacagaccagatcgcccatgtatt

SEQ ID NO: 37 - DNA, 2963 bp, Homo sapiens
  CDS (54)..(1157)
aaggatccttaattaaattaatcccccccccccgaaggaatcaagcccccaagatggcggcagcggcggaggagcggatggcagaggaaggaggcggcggccaaggcgacggcggttcctctttggcctccggctctacccagcgacagcctccaccgcccgcgccacagcacccgcagccggggtcccaggcgctcccagcccccgcgctggctccggaccagctgcctcaaaacaacacgcttgtggcgctgcccatcgtagccatcgagaacatcctcagctttatgtcctacgacgaaattagccagctccgcctggtttgtaaaagaatggacttggtctgccagagaatgttgaatcagggatttctgaaagtggagaggtaccataatctatgtcagaaacaagttaaagcacaactcccaaggagagagtcagaaaggagaaaccattcattagctcgtcatgcagacattcttgctgctgttgaaacaaggctgtcactattaaatatgactttcatgaaatatgtggattccaatctctgttgcttcatcccaggaaaggtgattgatgagatttatcgtgtgttgagatatgtcaattctaccagagcccctcaacgagctcatgaagtacttcaagaattaagggatatatcctctatggcaatggagtactttgatgaaaagattgttccaattttaaagaggaaattaccaggatcagatgtttctggaagactcatgggctctcctccagttccaggaccgtctgcagccctaacaacaatgcagctcttctccaagcaaaatccttcaagacaagaggttaccaaactccagcagcaggttaaaacaaatggtgctggcgtgactgttctcaggcgtgaaatttctgagcttcgcaccaaagtgcaagaacagcaaaaacagcttcaagaccaggaccagaaactgctagagcagacccagatcataggtgaacaaaatgcacggttggcagagctagaacgcaaactacgagaagtaatggaaagtgctgtaggaaattcctcagggtccgggcagaatgaggagtctcctcggaaacgaaaaaaggccacggaagccatagactctcttaggaaatctaaacgtcttcggaatagaaagtaaattggaatgtggttctagttccagaggaagacacagcttagtagcttaagcagttatgcatatcaggatactgtgagcaacatggtgtcccttaagcttctaggctttcagaacacaacttaaacttgaactcttatggttgggacattcttttcctgcttctcctgattgaactgatgcacagaatctttttactttgcaatagatttgtactaaccagacctgttctatcatgttttgaggagttaacttttttctgtgcagataatgttgaaagtaagttaatttgtttctgcatatatgcacatacatacgtaaggatcttaaacccagtcttgacagactagaagttaagtttaatacagaaaatgtcctgttcacttgaaagaaaagacctactttttaaatggacactatcttggttcttttttttttaagtcatctttttgttataagtgacctttgtctggaatgtctgaaaagtagttaatgctttttggtattgaagtaatgggtaactaaaatggacttccatagtattgactgtagaaggagcctctacaatattgactatatatttttataaactactggcaaggaacttacccagctgttatacatgttttcagttctctttgggggccatgtcctacatttgcatggatggatgcatgcattgcctagtcaactcacttaaaaagctcttgcactggtattgatcttgaacctctatacttctccactttttagagcggcgtcttagtttatttaaacgcttaacatcttccaccgcaacagcttgcctctagagggggaattgttcatccatttgtcctccagttttataggaacaagagactattaaagcccattgctttatctgctctctgtagggttcaggtacactggctaaggcagaaccccaaatttcaaggctctttctatcaatattggacctctgggagctaatactcctctttgctcaccaccatgtgatcattgatcagatgtggtgagtgagtaggggactcgacttgcgggatgcagttttgccattgcagcaaagttcattgaggaaaattgtaccatgaaaaagcattttgattatttcatttctggaggatgaccttgagggaagctttttaatattagtttcaagctttccttaccctacaactttaaacaaaagctttaattttgtttgcactcctattttgagcttgtaactggaaaagcatgtcttgcactgttcaacctcctgagtggtcgctttaacaacctccaaattgtgtacagtggttattttccccagttgtatagttttgagacattcaattatcactgtcttagttgtattttaatttactaaattatgtagctatttgactgttaagttcttttaaacaactgtttccttgggcttcagttatttaaagtaaatttaggtgtaatatagaaaactgtccctttccaggtgggagcttaacacctgtataaaacctaaggttttggtaagtaccttagttgaataaaagcacaaggttatcaccttttttatccgtccaccgtgacatggttatgcatcctttagattaacctcaccaaatgaagctttttctatccatttttaatattgtccttacataatattgtccttagattttgatcaattctatgtctgactttgaaattccatttacaatgtagtatgttttcaatgaaaaaccataaagtaacatccaagtgtttcatggtttgttgggaaggtaattttaaaataaaacaatttccaaaaaaaaaaaa

SEQ ID NO: 38 - DNA, 782 bp, Homo sapiens
  CDS (32)..(433)
cacatgcctatcatatagtaaaacccagcccatgacccctaacaggggccctctcagccctcctaatgacctccggcctagccatgtgatttcacttccactccataacgctcctcatactaggcctactaaccaacacactaaccatataccaatgatggcgcgatgtaacacgagaaagcacataccaaggccaccacacaccacctgtccaaaaaggccttcgatacgggataatcctatttattacctcagaagtttttttcttcgcaggatttttctgagccttttaccactccagcctagcccctaccccccaattaggagggcactggcccccaacaggcatcaccccgctaaatcccctagaagtcccactcctaaacacatccgtattactcgcatcaggagtatcaatcacctgagctcaccatagtctaatagaaaacaaccgaaaccaaataattcaagcactgcttattacaattttactgggtctctattttaccctcctacaagcctcagagtacttcgagtctcccttcaccatttccgacggcatctacggctcaacattttttgtagccacaggcttccacggacttcacgtcattattggctcaactttcctcactatctgcttcatccgccaactaatatttcactttacatccaaacatcactttggcttcgaagccgccgcctgatactggcattttgtagatgtggtttgactatttctgtatgtctccatctattgatgagggtcttaaaaaaaaaaa

SEQ ID NO: 39 - DNA, 1739 bp, Homo sapiens
  CDS (777)..(1025)
ctccggaattcccgggacgaaatcgtcgacagcgaagggtaccctaaccgtgcaaaggtagcataatcacttgttccttaattagggacctgtatgaatggctccacgagggttcagctgtctcttacttttaaccagtgaaattgacctgcccgtgaagaggcgggcatgacacagcaagacgagaagaccctatggagctttaatttattaatgcaaacagtacctaacaaacccacaggtcctaaactaccaaacctgcattaaaaatttcggttggggcgacctcggagcagaacccaacctccgagcagtacatgctaagacttcaccagtcaaagcgaactactatactcaattgatccaataacttgaccaacggaacaagttaccctagggataacagcgcaatcctattctagagtccatatcaacaatagggtttacgacctcgatgttggatcaggacatcccgatggtgcagccgctattaaaggttcgtttgttcaacgattaaagtcctacgtgatctgagttcagaccggagtaatccaggtcggtttctatctacttcaaattcctccctgtacgaaaggacaagagaaataaggcctacttcacaaagcgccttcccccgtaaatgatatcatctcaacttagcattatacccacacccacctaagaacagggtttgttaagatggcagagcccggtaatcgcataaaacttaaaactttacagtcagaggttcaattcctcttcttaacaacatacccatggccaacctcctactcctcattgtacccattctaatcgcaatggcattcctaatgcttaccgaacgaaaaattctaggctatatacaactacgcaaaggccccaacgttgtaggcccctacgggctactacaacccttcgctgacgccataaaactcttcaccaaagagcccctaaaagcagccacatctaccatcaccctctacatcaccgccccgaccttagctctcaccatcgctcttctactatgaacccccctcctcacacccaaccccctggtcaacctcaacctaggcctcctatttattctagccacctctagcctagccgtttactcaatcctctgatcagggtgagcatcaaactcaaactacgccctgatcggcgcactgcgagcagtagcccaaacaatctcatatgaagtcaccctagccatcattctactatcaacattactaataagtggctcctttaacctctccacccttatcacaacacaagaacacctctgattactcctgccatcatgacccttggccataatatgatttatctccacactagcagagaccaaccgaacccccttcgaccttgccgaaggggagtccgaactagtctcaggcttcaacatcgaatacgccgcaggccccttcgccctattcttcatagccgaatacacaaacattattataataaacaccctcaccactacaatcttcctaggaacaacatatgacgcactctcccctgaactctacacaacatattttgtcaccaagaccctacttctaacctccctgttcttatgaattcgaacagcatacccccgattccgctacgaccaactcatacacctcctatgaaaaaacttcctaccactcaccctagcattacttatatgatatgtctccatacccattacaatctccagcattccccctcaaacctaaaaaaaaaaaaaa

SEQ ID NO: 40 - DNA, 2386 bp, Homo sapiens
  CDS (447)..(1691)
aagagggccacgagctgcgaaagggcgggaaaggcagttggagaagagaaatcttcccaaggctgcagacaccgacggatttgctttgggagccagagtagctgccgccaccagagtccggagccatgagcgggtttaattttggaggcactggggcccctacaggcgggttcacgtttggcactgcaaagacggcaacaaccacacctgctacagggttttctttctccacctctggcactggagggtttaattttggggctcccttccaaccagccacaagtaccccttccaccggcctgttctcacttgccacccagactccggccacacagacgacaggcttcacttttggaacagcgactcttgcttcggggggaactggattttctttggggatcggtgcttcaaagctcaacttgagcaacacagctgccaccccagccatggcaaaccccagcggctttgggctgggcagcagcaacctcactaatgccatatcgagcaccgtcacctccagccagggcacagcacccaccggctttgtgtttggcccctccaccacctctgtggctccagctaccacatctggaggcttctcattcactggtggaagcacggcccaaccctccggtttcaacattggctcagcagggaattcagcccagcccacggcacctgccacgttgcccttcactccggccacgccagcagccaccacagcaggtgccacacagccagctgctcccacacccacagccaccatcaccagtactgggcccagcctctttgcgtcaatagcaactgctccaacctcatctgccaccactggactctccctctgtacccctgtgaccacagcgggcgcccccactgctgggacacagggcttcagcttaaaggcacctggagcagcttccggcacctccacaacaacatccaccgctgccaccgccaccgccaccaccaccaccagcagcagcaccaccggctttgccttgaatttaaaaccactggcgccagccgggatccccagcaatacagcagctgccgtgaccgctccacctggccctggcgcagctgcaggggcggctgccagctccgccatgacctacgcgcagctggagagcctgatcaacaaatggagcctggagctagaggaccaggagcggcacttcctccagcaggccacccaggtcaacgcctgggaccgcacgctgatcgagaatggagaaaagatcaccagcctgcaccgcgaggtggagaaggtgaagctggaccagaagaggctggaccaggagctcgacttcatcctgtcccagcagaaggagctggaagacctgctgagcccactggaggagttggtcaaggagcagagcgggaccatctacctgcagcacgcggatgaggagcgtgagaaaacctacaagctggctgagaacatcgacgcacagctcaagcgcatggcccaggatctcaaggacatcatcgagcacctgaacacgtccggggcccccgccgacaccagtgacccactgcagcagatctgcaagatcctcaatgcgcacatggactcactgcagtggatcgaccagaactcggccctgctgcagaggaaggtggaggaggtgaccaaggtgtgcgagggccggcgcaaggagcaggagcgcagcttccggatcacctttgactgagcgacagcagccctggggcccgcaggtccctagggagttcatgaggggaatgcgccctgttgtctgtagtttggggttgtggcaagatacttgtttgtttgtttctttctttcacatgactgcccttgacatgatcgctgtgtgctttgcgtttttccatttaggagggtattctgggccttctgcccaggcagcagcctcatgggtgtggcttctgtggctttcatttgagtatctttggccccttttcacctactgcgaccacccacctcatcctggctcagcctggtgatggagaagtgctgatggtcttggtcccagccagggtcgtgggggcagccactctctccaaagcatagtcatgggtgtcatgaaaaaataccaaatgtaagagaacctccaagtcagggcgcagtggctcacccctgtaatctcagcactttgggtggccaaggcgggcagatgacttgaggtcaggagttcgagaccagcctggccaacatggtgaaaccccgtctctactaaaaatacaaaaattagtcaggtgtggtggacgcctgtgatctcaatctcagctactcgggaggctgaggcaggagaatcacttgaacccaggaggtgttgcagtgaaccaagatcacaccactgcactccagcctaggcaacagagactctgtctcaaaaaaaaaaaa

SEQ ID NO: 41 - DNA, 2303 bp, Homo sapiens
  CDS (29)..(2020)
cgcgggcacccggccccccagcgggaggatgaagcggcggaacgccgactgcagtaagctccgccgccccctaaagcggaaccggatcaccgagggcatttacggcagtacatttttatacctgaaattcctggtggtgtgggcacttgtcctcctagcagattttgtcctggagttcagatttgaatacctgtggccattctggcttttcatcagaagcgtctatgattccttcagataccagggactggccttctcagtattttttgtttgtgtagcattcacgtcaaatataatatgcctgctgttcatccccatacagtggcttttttttgctgctagcacatatgtatgggttcagtacgtatggcacacagaaaggggagtgtgtttgcctacagtgtctctctggatcctctttgtttatattgaagcagccattagatttaaagatctcaaaaactttcatgtagacctttgtcgtccatttgctgctcactgtattgggtaccctgtggtaactttggggtttggcttcaaaagttacgtaagctacaaaatgcggttaaggaagcaaaaagaagtacaaaaagagaacgagttttacatgcaacttcttcaacaagctctccctccagagcaacagatgctacagaagcaagaaaaagaggccgaggaagcagccaaaggattacctgatatggattcttcgatccttatacaccacaatggaggtatcccagccaacaaaaaactctccacaactttgccagagatagaataccgagaaaaagggaaagaaaaggacaaggatgccaaaaaacacaaccttggaataaataacaacaatattctacaacctgtagactctaaaatacaagagattgagtatatggaaaaccatatcaatagtaaaagattaaataatgatcttgtgggaagtacagaaaatctcttgaaagaggactcatgcactgcttcctcaaaaaattacaaaaatgccagtggagttgtgaactcttcacctcgaagtcatagcgccacaaatgggagcattccttcctcatctagtaaaaatgagaagaagcagaaatgcactagcaagagcccaagtacacacaaggacttaatggaaaactgtattcctaataaccagctaagcaaaccagacgcactggtcaggctggaacaagacattaaaaagttaaaggctgacctgcaagccagcagacaagtggaacaagagctccgcagtcagatcagctccctttcgagcaccgagcgagggatccgctcagaaatgggccagcttcggcaggagaacgagctgctgcagaacaagttacataatgctgtgcaaatgaagcaaaaagacaagcagaatatcagccagttggagaaaaagctaaaagctgagcaggaagcccgaagttttgtagagaaacagttaatggaagagaaaaagaggaagaagttagaagaagccactgctgcccgggctgttgcgtttgctgctgcatctaggggagaatgcaccgaaaccttacggaatcggatcagagaactagaagcagagggcaagaagctcacgatggacatgaaggtgaaagaagaccaaatcagagaactagaactaaaagtccaggagcttcggaaatataaggaaaatgagaaggacactgaggtgttaatgtcagccctctcagccatgcaagacaaaacacagcacctggagaacagcttaagtgcagagacgagaatcaagctggacctgttctccgcactgggcgatgcaaagcggcagctcgagattgcccaaggacaaatccttcagaaagatcaggaaatcaaggacctaaaacagaagatagccgaagtcatggccgtcatgcccagcataacatacagtgccgccaccagccccctgagccctgtttccccccactactcttccaaatttgtggagaccagcccctctggacttgaccccaatgcctctgtttaccagcccctgaagaaatgaaggccagctgtgtgttgtgcccaaaaatttggttaccggaaggcattgcaaaggagcgtctctggcagtcaagataaaaaaacagtttctattgtattttgtggaactgtatctgttgtcatttttaaaaaggggggaaaagataacatccaagtctgattagaactgcccatcagtttttcttgtaaatttttagaagacctcacagaactttacagtttatttttctcggccaacacattaaaaccattcttggatttcaagtagcaaaaaaaaaaaa

SEQ ID NO: 42 - DNA, 1309 bp, Homo sapiens
  CDS (184)..(948)
gggcaggctctaaaaaccctggaagcgttgcttcttttggcaggaatgggggttagcaggacctcaatggctcactatggctaagtgaacgctgactgggtcctccagcgtgagctagaacagacgtctctatggtcaagtaaacagcgcgcgtgctgtctttcccatgtggtggggttgcgcatgatcagtagctgcaccactagaaagatggcggaggaagagcaaagaaaaatccctttggttccagaaaatctcctgaaaaagaggaaggcttatcaggcactcaaagccacccaggcaaagcaggcacttttggcaaagaaggagcagaagaaaggaaaagggctcaggtttaagcgactggaatcattcctacatgattcctggcggcagaaacgtgacaaggtgcgtctcagacgactagaagtgaaacctcatgccttggaattgccagataaacattccttggcctttgttgtacgcatcgaaaggattgacggcgtgagtttactggtgcagagaaccattgcaagacttcgcctaaagaaaatttttagtggtgtctttgtaaaagtcaccccccagaatctaaaaatgctgcgtatagtggaaccttatgtgacctggggatttccaaatctgaagtctgtccgagaactcattttgaaacgtggacaagccaaggtcaagaataagaccatccctctgacagacaatacagtgattgaggagcacctggggaagtttggcgtcatttgcttggaagacctcattcatgaaattgccttcccagggaagcatttccaggagatctcatggttcttgtgccctttccacctctcagtggcccgtcatgctaccaaaaatagagtgggcttcctcaaggagatgggcacacctggctatcggggtgaacgcatcaatcagctcatccgtcagctgaactagacccaggtgccaaactgcggtaaattttttatcagtgaagtggaagcatgtgttttgttttggaaatttttatcaagtatcttcagagaagattatttcctgctttatcttcagaaactggaaagggtcaaagaaaagacagtagctggccggtcgtggtggctcatgcctgtaatcccaacacttagggaggctgaggtgggcagatcacctgaggttgggagttcgagaccagcctgaccaacatggagaaatgccatctctactaaaaatacaaaaattagccgggcatggtggcacgtgcctgtaatcccagctactcaggaggctgaggcaagagaattcctttgaccttggg

SEQ ID NO: 43 - DNA, 1989 bp, Homo sapiens
  CDS (17)..(1855)
cgtcggggctggagcgatggcggcgaccgcggtggcggcggctgtggcgggaaccgagtcggcccagggtcccccgggcccggcagcgtcgctggagctgtggctgaacaaagccacagacccaagcatgtcggaacaggattggtcagctatccagaatttctgtgagcaggtgaacactgaccccaatggccccacacatgcgccctggctactggcccacaagatccagtctccgcaagagaaggaagctctttatgccttaacggtgctggagatgtgcatgaaccactgtggggagaagttccacagcgaggtggccaaatttcgtttcctgaacgaactgatcaaagtgttgtccccaaagtacctggggtcctgggccacaggaaaagttaaaggaagagtcattgaaatactcttcagttggacagtctggtttccggaagacatcaagattcgagacgcttatcagatgctgaagaaacaaggaattataaaacaagaccctaaactaccagtggataaaatcttacccccaccatctccctggcccaagagctccatctttgatgctgatgaagaaaagtccaagcttctgacaaggcttctaaagagcaaccaccccgaggaccttcaggctgcaaaccggttaatcaagaatttggtcaaggaggaacaagaaaaatcggagaaggtgtccaagagggtcagtgcggtggaggaagtgcgaagccatgtgaaggtgctgcaggagatgctgagcatgtaccgcaggccagggcaggccccgcccgaccaggaggccctgcaggtcgtgtatgagaggtgtgaaaagctgcggcccacgctgttccggttggcgagtgacaccactgatgacgatgatgcactcgcggaaattctccaggcaaatgacctcctcacccaaggagttctgctgtacaaacaggtgatggagggccgggtcacctttggaaacagagtgaccagctcattgggagacatccctgtctccagagtctttcagaatccagcaggctgcatgaagacctgccccctgattgacttggaggtggacaatggacctgcgcagatggggactgtggtgccatctttgcttcatcaggacctggcagccttgggaatcagtgatgctcctgttacaggcatggtttctggtcagaattgctgtgaggaaaagaggaatccctcctccagcacgctgccaggcggtggtgttcagaacccttctgcagacaggaatttgctggacctcctctcaccacagccagctccgtgccctctgaattatgtttcgcagaaaagtgtccccaaggaagtgccaccaggtactaagtcctctccaggttggtcctgggaggctggcccgttggctccttccccatcttcacagaatacacctctggctcaagtgtttgtccctttggagtctgttaagcccagcagcctgccgcctctcattgtgtatgaccggaatggattcagaattctgctccacttctcccagacgggagcccctgggcacccagaggtacaggtgctgctcttgaccatgatgagcacggctccccagcctgtctgggatatcatgtttcaagtggctgtgccaaagtcaatgagagtgaagctgcagccggcatccagctccaagcttcctgcattcagtcctttgatgcctccagctgtgatatctcagatgctgctgcttgacaatccacacaaagaacctatccgcttacggtacaagctgacattcaaccaaggtggacagcctttcagcgaagtaggagaagtgaaagacttcccagacctggctgtcttgggcgcagcctaacttttcacaagatggacccttcatttcaagcttaggctggcgttacttttgctgtctagtcaggactaatcacggtgtttcagtgcggagtgccaagagtcctatcctgacgtcaaaaaaaaaaaaaaaaa

SEQ ID NO: 44 - DNA, 1089 bp, Homo sapiens
  CDS (122)..(1057)
cgcgtgggcggacgcgtgggcgcgcgccggaagtacctacctgggataacggcggcgagcggacggctgcatttacggggtctcccggagggccagagtcgtggcttacagaagagacgaaatgtggtctgagggacgatatgaatatgaaagaattccgagagaacgagcacctcctcgaagtcatcccagtgatgaatctggttatagatggacaagagacgatcattctgcaagcaggcaacctgaatacagggacatgagagatggctttagaagaaaaagtttctactcttcccattatgcgagagagcggtctccttataaaagggacaatacttttttcagagaatcacctgttggccgaaaggattctccacacagcagatctggttccagtgtcagtagcagaagctactctccagaaaggagcaaatcatactctttccatcagtctcaacatagaaagtccgtgcgtcctggtgcctcctacaaacggcagaatgaaggaaatcctgaaagagataaagagaggcctgtccagtctttgaaaacatcaagagatacttcaccctcaagtggttcagcagtttcttcatcaaaggtgttagacaaacccagtaggctaactgaaaaggaacttgctgaggctgcaagcaagtgggctgctgaaaagctagagaaatcagatgaaagtaacttgcctgaaatttctgagtatgaggcgggatccacagcaccattgtttactgaccagccagaggaacctgagtcaaacacaacacatgggatagaattatttgaagatagtcagctaaccactcgctctaaagcaatagcatcaaaaaccaaagagattgaacaggtttaccgacaagactgtgaaactttcgggatggtggtgaaaatgctgattgaaaaagatccttcattagaaaagtctatacagtttgcattgaggcagaatttacatgaaataggtgagcggtgtgttgaagaactcaagcatttcattgcagagtatgatacttccactcaagattttggagagcctttttagatttttctgctcaggctaaaaaaaaaaaa

SEQ ID NO: 45 - DNA, 2011 bp, Homo sapiens
  CDS (79)..(1812)
gttgtattagatggaggatgtgacatttcagataaaaagcttacaactttaaaggatagagctagagagaagatccagatggcccattccctttctgttggtgggagtgggtacgtatgtcccttactcatccgggaagtattcatacaggttttgatcaagctgcgggtgtgttttgtccagtgcttttcagaagcagatcgggacattatgacacttgctaaccattggaattgccctgtgttatcatcagatagtgacttttgcatttttgacctgaaaactgggttttgcccattgaatagctttcagtggagaaatatgaacactattaagggcacacaaaactatatccctgccaaatgcttttcccttgatgcattctgccatcacttcagcaatatgaataaagctctactacctctctttgcggtgctatgtggaaatgaccatgttaatctacccatcatggagacattcttaagtaaagcgcgtcttcctcttggagctaccagttctaaagggaggagacaccaccgaatcctgggacttctgaattggttgtctcattttgccaaccctaccgaagcactagataatgttctgaaatacctcccaaaaaaggatcgagaaaatgttaaggaacttctctgctgttccatggaagaataccaacagtcccaggtgaagctacaggacttcttccagtgtggtacttatgtctgtccagatgccttgaatcttggtttaccagaatgggtattagtggctttagctaaaggccagctatctcctttcatcagtgatgctttggtcctaagacggaccattcttcccacacaggtggaaaacatgcagcaaccaaatgcccacagaatatctcagcccatcaggcaaatcatctatgggcttcttttaaatgcctcaccacatctggacaagacatcctggaatgcattgcctcctcagcctctagctttcagtgaagtggaaaggattaataaaaatatcagaacctcaatcattgatgcagtagaactggccaaggatcattctgacttaagcagattgactgagctctccttgaggaggcggcagatgcttctgttagaaaccctgaaggtgaaacagaccattctggagccaatccctacttcactgaagttgcccattgctgtcagttgctactggttgcagcacaccgagaccaaagcaaagctacatcatctacaatccttactgctcacaatgctagtggggcccttgattgccataatcaacagccctggtaaggaagagctgcaggaagatggtgctaagatgttgtatgcagagttccaaagagtgaaggcgcagacacggctgggcacaagactggacttagacacagctcacatcttctgtcagtggcagtcctgtctccagatggggatgtatctcaaccagctgctgtccactcctctcccagagccagacctaactcgactgtacagtggaagcctggtgcacggactatgccagcaactgctagcatcgacctctgtagaaagtctcctgagcatatgtcctgaggctaagcaactttatgaatatctattcaatgccacaaggtcatatgcccccgctgaaatattcctaccaaaaggtagatcaaattcaaaaaaaaaaaggcagaagaaacagaataccagctgttctaagaacagagggagaaccactgcacacaccaagtgttggtatgagggaaacaaccggtttgggttgttaatggttgaaaacttagaggaacatagtgaggcctccaacattgaataaaactcagtttgcatcaaactagatgtatttaatataatccttacttaaaattcttccgttaccacccttgaaacaattagctttttctttaggactgacctgttaggggataaacatcacaataatctgaattccaagttattttgtattttgtttttaataaatacaacctgatttaagaaaaaaaaaaaaaaaa

SEQ ID NO: 46 - DNA, 381 bp, Homo sapiens
  CDS (169)..(348)
ccgtggccactacatgctttgttacataactagagaagtttgggctgacttctgctgtgtgaaaatatccctaaagagtacccgaatgagtgtgatctggtttattaaaaaacactaagacactgtggagcctgatttatactaaacttatctaggagagacaaaaaaatgataggaattgtgatcacagtcatccctcatataaacacggcatttttacctaaaaaaaaacaactttccaccaacacaaaaaagcggtctccctcttttctctctctcctctctctgtgtgtgtgtgtgtgtgtgtgtgtgtgtgtgtgtgtgtgtgtgtgtttattcctctgcctttaaaaagaccagaagaatgcacagatggattag

SEQ ID NO: 47 - DNA, 880 bp, Homo sapiens
  CDS (53)..(388)
taacccggcatctgatgccgttaacgatttgctgaacacaccagtgtaagggatgtttatgacgagcaaagaaacctttacccattaccagccgcagggcaacagtgacccggctcataccgcaaccgcgcccggcggattgagtgcgaaagcgcctgcaatgaccccgctgatgctggacacctccagccgtaagctggttgcgtgggatggcaccaccgacggtgctgccgttggcattcttgcggttgctgctgaccagaccagcaccacgctgacgttctacaagtccggcacgttccgttatgaggatgtgctctggccggaggctgccagcgacaagacgaaaaaacggaccgcgtttgccggaacggcaatcagcatcgtttaactttacccttcatcactaaaggccgcctgtgcggctttttttacgggatttttttatgtcgatgtacacaaccgcccaactgctggcggcaaatgagcagaaatttaagtttgatccgctgtttctgcgtctctttttccgtgagagctatcccttcaccacggagaaagtctatctctcacaaattccgggactggtaaacatggcgctgtacgtttcgccgattgtttccggtgaggttatccgttcccgtggcggctccacctctgaatttacgccgggatatgtcaagccgaagcatgaagtgaatccgcagatgaccctgcgtcgcctgccggatgaagatccgcagaatctggcggacccggcttaccgccgccgtcgcatcatcatgcagaacatgcgtgacgaagagctggccattgctcaggtcgaagagatgcaggcagtttctgccgtgcttaagggcaaatacaccatgaccggtga

SEQ ID NO: 48 - DNA, 883 bp, Homo sapiens
  CDS (436)..(711)
cattctgtcttttaatttttttttcttctctgtttccacatgctttctccagtataggatttctcagccttttcactattgacaattttggctggataatcctttgttgtggaggagctctcctgggcattgcagatgttaggaagaattcctggcctctttgcccagatccaaaatctgggcaaagaaaaaatcttctggaaagaattcagcattctagatgccaataaaaacactgatgtttcatggaaggagatcaaaatagcaacattaacaggggtctggaagaagttgattctgacttttgaaactgtcagtttcaaaatttcattgtaggaagtaactgtggatgtggtagaaacagcaagagaacttgaattagaagtgaaccctgaaaatgtgactagattgctgctatctcatgatcaaatttaaatggatgaggagttgcttcatagggatgaacaaagaaagtggtttcttgagatgagatctactcctggtgaagatgctgcgaacaacgttgaaatgacaacaaaggacttaaactatgacagaaacttagttgataaagcagtggtagggtttgaaaggactgactccaattttgaaagaagttgtactgtgggtaaacagcattgcatgatacagagaaattgttcatggaaagaagagtacatggatgcagcaaacttcattgttgtcttattttaagaaattgccacagccactccatccttcagcaaccaccaccctggtctattagaaaccatcaatatcaaggcaagattctccaccaacaaaaagctatgactcactgatggctcagatgatcattagcatttttcagcaataaagtatttctacattaaaaaaaaaaaaa

SEQ ID NO: 49 - DNA, 934 bp, Homo sapiens
  CDS (15)..(488)
aaccggagtagaagatggtagaaatcaataatcaacgtaaggcgttcctcgatatgctggcgtggtcggagggaactgataacggacgtcagaaaaccagaaatcatggttatgacgtcattgtaggcggagagctattcactgattactccgatcaccctcgcaaacttgtcacgctaaacccaaaactcaaatcaacaggcgccggacgctaccagcttctttcccgttggtgggatgcctaccgcaagcagcttggcctgaaagacttctctccgaaaagtcaggacgctgtggcattgcagcagattaaggagcgtggcgctttacctatgattgatcgtggtgatatccgtcaggcaatcgaccgttgcagcaatatctgggcttcactgccgggcgctggttatggtcagttcgagcataaggctgacagcctgattgcaaaattcaaagaagcgggcggaacggtcagagagattgatgtatgagcagagtcaccgcgattatctccgctctggttatctgcatcatcgtctgcctgtcatgggctgttaatcattaccgtgataacgccattacctacaaagcccagcgcgacaaaaatgccagagaactgaagctggcgaacgcggcaattactgacatgcagatgcgtcagcgtgatgttgctgcgctcgatgcaaaatacacgaaggagttagctgatgctaaagctgaaaatgatgctctgcgtgatgatgttgccgctggtcgtcgtcggttgcacatcaaagcagtctgtcagtcagtgcgtgaagccaccaccgcctccggcgtggataatgcagcctccccccgactggcagacaccgctgaacgggattatttcaccctcagagagaggctgatcactatgcaaaaacaactggaaggaacccagaagtatattaat

SEQ ID NO: 50 - DNA, 1376 bp, Homo sapiens
  CDS (442)..(1158)
gggcctctgtcctgtttgtccagcccgccagtttctgcagtggaggtcgcgactgagggacgggacagagaagtcgcgaaagtgggcctgaggttctgcgacaccacctcgggtgacgtgcgccaggcccgggatagggactgttgtgttcgaatgcccgccccggtcggccgccgctccccgcctagtccacggagctcaatggcggcagtcgcgctgagggactcggctcagtgagagaccgcggagtgttgggtcgtgtagaagtgactgaacccagaaggtggagacgagacgttgtcccgactgcacagaggctgctctgcagctccttaaaggcgctaggcgtgacccgcaccaaggccgggatcgggaccaccgggcccgggtacctgcactgctcgccccctcctttctaccccgctttccccacccagtcggatggcggcggccgcgctgaggcccccggctcagggcactgtgacctttgaagatgtggctgtgaacttttcccaggaggaatggagtctccttagtgaggctcagagatgcctttatcatgacgtgatgctggagaacctgacacttatatcttctctaggttgttggtatggagcaaaagacgagacaccttctaagcagaccctttctatacaacaggagtccccactcaggacacattggacaggtgtatgtaccaagaaggtccacctctggggaatgtgtggccctctcctgggagatatcttacaccagggaacacaacacaatcagaaattgaatgggtttggggcatatgaaaaaaaattggatgacgatgcaaaccatcatcaagaccagaagcagcacattggagagaaatcgtacagaagcaatgccaagggaacatcttttgtaaagaactgtaaattccatatgtcacatgagccatttatctttcatgaggttgggaaagactttttgtccagcttgagattactccaacaagaggacattcacacttcagggaagtcagactttgaaactaagcatgggataccgcttcagggtggaaaaactcattacatctgtggagagtccacataccgtttagcaacaaacactcccttgttcctccaccagagacttcctcctagaggaaggaccctatgtatgcagtgattctgggaaattcacttgcaaaagtaatagtttttattatcctccgggggttcggcctgggaaaaggacttactagtgtggcaaagtggttgaatccttttggtatagggccacctcactgaaccccgagagttccactggaggaagacctctggaggtggggatgtgatgaacctcttgttctaagccggtcttgtgtgccttgcgggtctcct

SEQ ID NO: 51 - DNA, 2325 bp, Homo sapiens
  CDS (277)..(1815)
  misc_feature (1)...(2325): n = a,t,c or g
ctcctatgtctggagagtgatcactttcactcccaaagacatcctttggtgatacttactgtgggattcagagtggggtgcagaggacgaccctgcaaaggcacggactataagagagatctgtgcagctgcgcctcagggggtgtcctgggcccctgggcatgacaggagggggaccacttgcagttctactggaaaatttaccacccttccagaatcctctgaagatatacaggtcgcaactagagtgagacccgagtactgccttgggtcagaatggctagagaaccgagaaaaaacgcagccctggacgcccagtctgcagaagaccagacggggttcctgaccgtgaaggtggagaaggaggaagccttcgccttgacggcggaggtgagagcaccctgcagccctgctcggggccccgaacgctcccgccagcgcttccgaggcttccgctacccggaggctgcgggcccccgcgaggcgttgagccggctccgagaactctgcggacaatggctgcagcctgagatgcacagcaaggagcagatcctggagctgctggtgctggagcagttcctgaccatcctgccggggaatctgcagagctgggtgcgggagcagcatccagagagcggggaggaggtggtggtgctattggagtatttggagaggcagctggatgagccggcgccgcaggtagaaagaacaggtttagtatctgagcgctgtggtctgtttcctcctgaaatcccagatcggagcgaggggcattcctttaaggtccaggagttcttcatctctttttgtactgtgaacctccttggcagtaagggtttgctgaaaatggaagatgtggccctgaccctcactcctgggtggacacagctggattcatctcaggtgaacctctacagagatgaaaagcaggagaaccatagcagcctggtctcccttggtggtgaaatacagactaagagcagggacttgcctccagtcaagaagcttccagaaaaggagcatgggaagatatgccacctgagggaagacattgcccagattcctacacatgcagaagctggtgaacaggagggcaggttacaaagaaagcagaaaaatgccatagggagtaggcgacattattgccatgaatgtggaaagagttttgctcaaagttcaggcctgactaaacacaggagaatccacactggtgagaaaccctatgaatgtgaagactgtggaaagaccttcattgggagctctgcccttgtcattcatcagagagtccacactggtgagaagccatatgagtgtgaagaatgtggtaaggtcttcagtcacagctcaaaccttatcaaacaccagagaacccacactggggagaagccctatgagtgtgatgactgtgggaagaccttcagccagagctgcagcctccttgaacatcacaaaattcatactggggagaagccataccagtgcaatatgtgtggcaaagcctttaggcggaattcacatctcctgagacatcagaggattcatggtgataaaaatgttcagaatcctgagcacggggagtcctgggaaagtcagggtaggacggaaagccagtgggaaaatactgaggctcccgtgtcttataaatgtaatgagtgtgagagaagtttcacacggaatagaagtcttattgaacatcagaaaatccacactggtgagaaaccctatcagtgtgacacatgtggaaaaggtttcactcgaacttcataccttgttcaacatcagagaagccatgtagggaaaaaaactctttcacagtgacccatggtattcatgccaacattggtgctcatttgtcactgaactgaagccaccctggagcccttaatggttacagaaattgtggaccagggctttatttaccactatacatcatcaggtattagacaatgtagtctggctaagatgatgagttattttcaacatttctaaaagggatttgaaaaaagtcatttgataagaggccatgggagagtggtctggaagttgtaggacctaaaatagtttgttctcacccagtgtatttaaatggccttctggacttgttaattgccctcagccagcactttaggacatctggttggatggctctgatgtggggggctgctgctctgaccattcattttgcctctaatgaatctttcacaaattggtcagatccatgaggtcttttactcttctttgtgccttgtatgataggtgctnaataaacatttattaaatgtaccagtaaaatggcctttgtaccaaaaatttaaaaaaaaaaaa

SEQ ID NO: 52 - DNA, 921 bp, Homo sapiens
  CDS (40)..(762)
cagcggttcagctgaggtagggacgtgctgtaggccggaatgttaccggctgttggatctgcggatgaggaggaggatcctgcggaggaggattgtcctgaattggttcccatggagacgacgcaaagcgaggaggaggaaaagtctggcctcggcgccaagatcccagtcacaattatcaccgggtatttaggtgctgggaagacaacacttctgaactatattttgacagagcaacatagtaaaagagtagcggtcattttaaatgaatttggggaaggaagtgcgctggagaaatccttagctgtcagccaaggtggagagctctatgaagagtggctggaacttagaaacggttgcctctgctgttcagtgaaggacaatggccttagagctattgagaatttgatgcaaaagaaggggaaatttgattacatactgttagagaccactggattggcagacccaggtgcagtggcttctatgttttgggttgatgctgaattagggagtgatatttaccttgatggtatcataactatagtggattcaaaatatggattaaaacatttagcagaagagaaacctgatggccttatcaatgaagctactaggcaagttgctttggcagatgccattctcattaataaaacagacttggttccagaagaagatgtaaagaaattaagagcgacaattagatccataaatggactaggacaaatcttagaaacacaaagatcaagaacaataaacatgcagtgattgatttttcttacttcaagtggatgagtgagcaagtgactaaaatcttccgtgaattcttcagtagttgatctctctaatgtattagatcttcatgcctttgatagtctctctggaataagtttgcagaaaaaacttcagcatgtgccaggaatt

SEQ ID NO: 53 - DNA, 3173 bp, Homo sapiens
  CDS (375)..(2657)
  misc_feature (1)...(3173): n = a,t,c or g
cgcggcaaggggcagagaaggagccaagtggcgacgtggtcatgcgcagaaagatccgtccggctctctgagcagagggtagcgtgtgggggcgggataccgacgcggctcggctgccgattggtcagaagaggatagaaaggggcgggaagccggcgcggctcgactcccgattggccagaggcggcagaacggggtggggccaaacgacgcgcgttctgtggcgcgcggcctggcgggcgtgcaacggccgttagaggagctgagggagggaaccaccgctcaccgcagacgtggtggctgcagtcagtcttcccgagtgagggatttcgccgcccgctttcaggcccgtttggcttaaataactgtgattgatggccatgcaggagaaatatccaactgaggggatctctcacgtcacttcaccgagttccgatgtgattcagaagggcagttccctggggactgaatggcagaccccagttatctcggagccctttcggagccgcttcagccgctgttcaagtgtagccgacagtggggacacagccattggtacatcatgctcagatattgcggaggatttttgcagctcaagtggcagtcctcctttccagcccatcaaaagccacgtaaccattccaacagcccatgtgatgccttctactttagggacctctcctgccaagccaaattctacacctgttggaccctcttcctctaaactccctttgtcagggttggctgaaagtgtgggaatgacaagaaatggagacctcggtgcaatgaaacattctccaggcctatctagagatctcatgtatttctctggtgctactggagaaaatggaattgagcagtcctggtttccagcagtgggccatgaaagacaagaagaggcgaggaagtttgatattcctagcatggaatctaccctcaatcagtcggcaatgatggagacactttattcagatcctcaccaccgagtccgcttccacaacccaagaaccagcacaagtaaggagttgtacagagtgttgcctgaggccaagaaggcaccgggcagcggggcagtgtttgagcggaatggaccacattctaatagcagtggggtcctccctttgggactccagcctgctcccgggctctccaagcctctgccctctcaggtgtggcagccgagtcctgacacttggcatccccgagagcaatcttgtgaactcagcacttgtcggcagcagctggaattgattcgtttacagatggagcaaatgcagcttcagaatggagccatctgccaccatcctgctgcttttggtccttcactgcccatcttagagccagcacagtggatcagcatcttgaacagtaatgaacaccttctgaaggaaaaagagcttctcattgacaagcagaggaaacacatctctcagctggagcagaaagtgcgagagagcgaactgcaagtccacagtgccctcttgggccgccctgccccctttggtgatgtctgcttgctgaggctacaggaattgcagcgagaaaacactttcttacgtgcacagtttgcacagaagacagaagccttgagcagagaaaagattgaccttgaaaagaaactctctgcttctgaagttgaagtccagctcatcagagagtcgctcaaagtggcgttgcagaagcattctgaggaagtgaagaaacaggaagaaagggtcaaaggtcgtgataaacatatcaataatttgaaaaagaaatgccagaaggaatcagagcagaaccgggagaagcagcagcgtattgagaccttggagcgctacctggctgacctgcccacactggaagaccatcagaagcagagccagcagcttaaggattctgagttgaagagcacagagctgcaggagaaagtgactgagctggagagtttgctggaggagacccaggcaatctgcagagagaaggagattcaactggaaagcctgaggcagagagaagcagaattctcctccgctggacatagcctgcaagataaacagtctgtggaggagaccagtggagaaggtccagaagtggaaatggagtcctggcagaagcgatacgattcgctccaaaagattgtggagaagcagcagcagaagatggatcagttgcgctcacaagtacagagcctagagcaggaagtggctcaagaagaaggaacaagccaggccctgagagaggaggcccagcgaagggattcagccctgcagcagctgcgcacagccgtgaaggagctttcagtgcaaaaccaggacttgattgagaagaatctgacactccaggaacacctgcgccaggcccaaccagggtctccaccttcaccagacacggcccagctggcacttgagctgcaccaggagttggccagttgccttcaagatctgcaggctgtctgtagcattgtgacccagagggcccagggccatgaccccaatctctccctgctcctgggcattcactcacagcacccagagactcagctagatttgcagaagccagatgtgatcaagaggaaactagaagaggttcaacagctgcgtcgtgacattgaggacttaaggaccaccatgtcagacagatatgcccaggacatgggagaaaactgtgtcacacagtgaggaattctgggggattcccccagggaggagctgggctgctgagagcctagtccagcaggtttctgccctgacattctcttgtctgctattcccagagaggtctcaaaggggaggggagagcctgcatctgggggccaagggctgattagggaactgtgtcctacccacactggcatgttggattacgtttgtcctgttaattcactctcgacggtgagttactaattaacttttggcaggtacaacagataagtcctcacanactgttcccagcccttagctgacaggaaagacgaacaggctgttcacctttcttctccatccaatgggatggatccatgtttatttccccttcacaccttggtccttgtggatagaaaagctattaaaagggcccgggaaagggttgacaagtaccagtggacatgggcattttaagaattttcaaggccccatgtgccaaccctcctggggaactggagcgggctttctggggttttctaaagcctgggg

SEQ ID NO: 54 - DNA, 6288 bp, Homo sapiens
  CDS (303)..(4934)
taagcttgcgtccgccgctccgcctcccaggatgagctgaatcagcttgaacgggtctttttacgacttggccatgctgaaacagatgaacaattacagaatattatatctaaattccttcctcctgttttgctcaaactctctagcacccaagaaggagtacgtaaaaaggtaatggaactgctggtccatctgaataaacgtataaaaaaccgccccaaaatacaacttccagtagagacctggaattgaaaagcaaacagagcttaattgactggaataatcctgccatcattaataagatgtacaaggtgtaccttggagatataccactgaagacaaaagagggtgcagttctgaagccagagttgaaaagggaccctgtcagtacaagagtcaagttaaagattgtcccccatctcctccgctctagacaagctgctgaaacgttcccagccaacattcaggtggtgtatgatggactttttggtacaaatacaaattcaaagttaagaacattatccctgcaatttgtgcatcatatttgtataacctgtccagaaatcaagattaagccattaggtccaatgcttttgaatggcctcaccaagctaatcaatgaatacaaagaggaccctaaactactgtcaatggcatattcagctgttggaaaactctccagtcggatgccacatttattcactaaggatatagcgcttgtgcagcagctttttgaagccctttgcaaggaagagcctgagactcgacttgctattcaagaagctttatctatgatggttggagcgtatagtactttggaaggggcacagcgaactctcatggaggcacttgtggcttcgtacttaataaagcctgaagttcaagttcgacaagtggctgtgaaatttgccagtacggtgtttccctcagatcatatcccttccagatatttgctgctactggctgcaggagatccacgtgaagaagttcatggagaagcacaacgcgtattaaggtgtcttccaggtagaaacagaaaagaaagtacttctgagcagatgccttccttcccagaaatggtttattacatccaagaaaaggcttctcatcgaatgaaaactccagtcaagtacatgaccgggaccactgtccttccatttaacccagcagcctttggagagatcgttctgtacttgcgcatgtgccttgcgcacagtgcgggggtggtgcccacctctcagagtttggctgatatgcaggatcatgccccagccattgggcgctacatacggactttaatgtcaagcgggcagatggcaccctcatcatctaacaagagtggggagactaaccctgtccagatctacattggcctgcttcagcagctgttagcaggtgttggaggtttgccggttatgtactgtctattggaagctgtgtcagtgtatccagaaaagctggctaccaaatttgtagacaaaacagaatggataaagagtctgatgaataacagtaaagaagaaatgcgcgaactggcagcgttgttttattctgtagtggtatcaacagtgtcggggaatgagttgaaatcaatgatagaacagcttataaagactacaaaagacaatcacagcccggagatacagcatggatccttgcttgcattgggattcacggtgggaaggtatttggctaaaaagaaaatgagaatgtcagagcaacaagacctggagagaaatgctgacaccctccctgatcaagaggaactcattcagagtgctacagaaacaataggctcatttttggacagtacatcacccctcctggcaattgctgcctgcacagccctgggtgaaattggcagaaatggtccacttccaatccccagtgagggatctggctttaccaaattgcatcttgtagaaagcttactaagtagaataccttccagtaaagaaacaaataagatgaaagaacgagcaatccaaacactgggatattttccagttggggatggagattttcctcaccagaaactcctcttgcaaggtctgatggattctgtggaggccaagcagatagaacttcagttcactattggcgaagccattaccagtgctgcaataggaactagttctgtggctgcccgagatgcctggcaaatgactgaagaggaatatactccacctgctggagccaaagtgaatgatgtggttccatgggtgttggatgtgattttaaataaacatatcatcagccccaacccacacgtgaggcaagcagcctgcatctggctcctttcccttgtcaggaagctaagtacccacaaagaagtgaagtctcatcttaaagaaattcaaagtgcatttgtttcagttctatcagaaaatgatgaacttagccaagatgttgcatcaaagggccttgggttggtttatgaactaggcaatgaacaagatcaacaggaattggtttctacacttgtggaaacacttatgactggcaaaagagttaaacatgaagtttctggagagacagtggtatttcaagggggagctcttggcaaaacaccagatggtcagggcctttctacttacaaggaactttgttctctggcaagtgatcttagccagccagatctggtgtataaatttatgaatttagccaaccatcatgcaatgtggaactctaggaagggtgctgcttttggttttaatgtaattgctaccagagctggagagcagctggctccttttctgcctcagctagttcctcgactttatcgttaccagtttgatcccaaccttggcattcgacaggccatgacaagtatttggaatgcgttggtcactgacaaatccatggtggataaatatttgaaagaaattcttcaagatttggttaagaaccttacaagcaatatgtggcgagttcgagaatccagctgtttagctttgaatgatttattgagaggaagacccttagatgacatcattgataaacttccagaaatttgggaaacgctttttagagtacaagatgatatcaaggaatctgtacgaaaagcggcagaactagctctgaaaactctgagcaaggtctgtgtgaaaatgtgtgaccctgccaaaggagcagctggccagagaaccatcgctgcccttctgccttgccttctggacaaaggaatgatgagcaccgtgacggaagttcgagccctcagcattaacacccttgtgaagatcagcaaaagtgcaggagccatgttgaaaccgcatgcaccaaaactcattccagctctgctagagtccttaagtgtattggagccccaagttctcaattatttgagcctccgggcgacagagcaagaaaaggctgcgatggatagtgctcggcttagtgctgccaaatcttctccaatgatggaaacaatcaacatgtgcctgcaataccttgatgtgtcagtgctgggcgagctagttcctaggttgtgtgaactgatcagaagtggtgtaggtcttggaactaagggtggctgtgccagtgtcattgtgtcattaactactcagtgtcctcaggacctaacaccttactcaggtaaacttatgagtgctttgctgagtggcctgacagatcggaacagtgtgattcagaaatcttgtgcatttgctatgggccatttagttcggacctcacgggatagcagcactgaaaaactcctgcagaagctcaatgggtggtatatggagaaagaagaacctatctacaagacctcttgtgctttgactattcatgctattggacgatacagccctgatgtattaaagaatcatgcaaaagaagtcctgcctctggcatttttaggcatgcatgaaattgctgatgaggagaaatccgaaaaagaagaatgtaatttatggaccgaagtgtggcaggaaaacgtacctggatcctttggtggcattcgattatacctgcaggagttaattactattacccagaaggctttgcagtctcagtcctggaaaatgaaagcccagggtgcaattgccatggcatcaattgcaaaacagactagctctctagtacctccatatctcggaatgatactgaccgcattgctgcaaggcctggctggaagaacgtgggcaggaaaggaggagctattgaaagccattgcctgtgtggtgacagcttgcagtgcagagctggaaaagtctgtgcccaatcaacccagcacaaatgaaattcttcaagctgttctgaaggaatgtagcaaagagaatgtcaaatacaagattgtagcaatcagctgtgcagctgatatcttgaaggccaccaaagaggacagattccaggagttctctaacattgtcatacctctcatcaagaagaactcacttgaaagcagtggggtccggacaaccaaaaatgaagaggagaatgaaaaggaaaaggagctccagctggaatatctgctgggtgcctttgaaagcctgggcaaagcctggccgcgaaacgcggagacccaacgttgttatcgtcaggagctgtgcaaactgatgtgtgaacggctaaaactcagcacgtggaaagtgcagctaggagtcctgcaatcaatgaatgccttttttcaggggttaatgcttttggaagaagaacatgccgatcctgaggctttggctgaaattctgcttgaaacttgtaaatcaatcacatattctttagaaaataagacctactcatctgtgagaacagaagctttatctgtgatagaattgctgcttaaaaaacttgaagaatctaaacagtgggaatgtttgacatctgaatgcagagtgctcctaattgagtctttagctactatggagccagacagcagacctgaactgcaggagaaagcagcgttactgaagaaaacacttgaaaatctggaataaattagaaggggaagaaacaaacaagtgccatgttcattgggggttgaagtggtggtgttctttgaaaaaccaagtgggaaaaagtaaagattaatctgtagcatgcatcattccttggctgaaataaaaagaaaaagccttaaattttgttccttattagctttattttactttatgtttttaaagtatctgggctgagtgagcttaatggaaccttggatgtttgaggggtggttgtaaaggaaactggcagaaatagttactaaaagagttcaagctgttattaaaggaattaatagacagagttgcagagcaagctggataaaaatcttagaactgcattcaaattagttatttcaggaaggggccctataaataacttattttaacctccctcttacacctgaagaaataggaagctgtgtcatctcagaggctttctgaggcctgtgccaaagtcagaacccaggtgtttaatgtctggccctggatactttcttttatggccatctgccaaatcagtgctaaccccggcttacccaagaaacttccaagatgaggtacgtttagggtggcacacagcagtctttgtgccagaactaaactgacccttaccattgggtttctgaaagccagaagctaaacattgtcttgtcatgtgtttaggtggttgatttggagaaaatgattgtttagcatctttacagatggagaggacagagtcagtctccttcggataattccaatcgtcttccttttacaggtggataaagtagattaggacaagatcacacattctatctgtgtctgtggctgcatattttgcaaaaccagaaacaaaatcgcagactgccgtggtttagaccatttataatgtcaaaactgtaatgacaaatttctgttcacttttatgctaccagtatgactttataggggagaaggaaagccttttaattagccacctgggaattactcttttaaaaaatgccttttctcaaaagaacatgataccactccaagtaaatcattgccactaggggttttcctccttccttctgttgcccatgcccctgcctgaaagtgtagggtaagaggaaaaacaagtaaaaccttagtgttgatggtaaactgagaactctgtagcttaccttggattccagagcagaagactggtttacattcagtactcatccttattgacgttaacaccaggaatctccatgtttattatttttcgtggaaactccatgtttattatttttggtggtctctattgaccaatgtatttcaaacttttttgactgcaagtcataataaaaataactttttacatcacgacccagaaaaaaaa

SEQ ID NO: 55 - DNA, 2004 bp, Homo sapiens
  CDS (88)..(1626)
taagcttgcggccgcttccgactcagcctcttcagcgacctgcccgaggacacggagttgcagaggaagctagaccatgagatccggatgagggaaggggcctgtaagctgctggcagcctgctcccagcgagagcaggctctggaggccaccaagagcctgctagtgtgcaacagccgcatcctcagctacatgggcgagctgcagcggcgcaaggaggcgcaggtgctggggaagacaagccggcggccttctgacagtggcccgcccgctgagcgctccccctgccgcggccgggtctgcatctctgacctccggattccactcatgtggaaggacacagaatatttcaagaacaaaggtgacttgcaccgctgggctgtgttcctgctgctgcagctgggggaacacatccaggacacagagatgatcctagtggacaggaccctcacagacatctcctttcagagcaatgtgctcttcgctgaggcggggccagactttgaactgcggttagagctgtatggggcctgtgtggaagaagagggggccctgactggcggccccaagaggcttgccaccaaactcagcagctccctgggccgctcctcagggaggcgtgtccgggcatcgctggacagtgctgggggttcagggagcagtcccatcttgctccccaccccagttgttggtggtcctcgttaccacctcttggctcacaccacactcaccctggcagcagtgcaagatggattccgcacacatgacctcacccttgccagtcatgaggagaaccctgcctggctgcccctttatggtagcgtgtgttgccgtctggcagctcagcctctctgcatgactcagcccactgcaagtggtaccctcagggtgcagcaagctggggagatgcagaactgggcacaagtgcatggagttctgaaaggcacaaacctcttctgttaccggcaacctgaggatgcagacactggggaagagccgctgcttactattgctgtcaacaaggagactcgagtccgggcaggggagctggaccaggctctaggacggcccttcaccctaagcatcagtaaccagtatggggatgatgaggtgacacacacccttcagacagaaagtcgggaagcactgcagagctggatggaggctctgtggcagcttttctttgacatgagccaatggaagcagtgctgtgatgaaatcatgaaaattgaaactcctgctccccggaaaccaccccaagcactggcaaagcaggggtccttgtaccatgagatggctattgagccgctggatgacatcgcagcggtgacagacatcctgacccagcgggagggcgcaaggctggagacacccccaccctggctggcaatgtttacagaccagcctgccctgcctaacccctgctcgcctgcctcagtggccccagccccagactggacccaccccctgccctgggggagaccccgaaccttttccctggatgctgtccccccagaccactcccctagggctcgctcggttgcccccctcccacctcagcgatccccacggaccagaggcctctgcagcaaaggccaacctcgcacttggctccagtcaccagtgtgagagagaaaggtgctggcataggatctgcccagaagagaaaatgacccatgcgcagttgggctctggatacggcgctgtctatagcaagttggccagtctggcctcctgttcctctgctggacctggggtaggctgcaggggtgggcagaagcccctcttaaattgtggttgccatggtaccgagggactcattcctggggctcgctgggacctccctaaacccttcctggaagaaaactggaaccaactctgccctacctccctgcactaaccagctttgaggatggcactgaagaacccttggagcaaacatacctcccttgtgactcccacatcaaccattaaagttatttaacagcaaaaaaaaaaaaaaag

SEQ ID NO: 56 - DNA, 1643 bp, Homo sapiens
  CDS (184)..(1275)
acaccaaggcaggaggctaggaggtctacaaatagcgactgggtagctggtgtgaacacagggggtactgggggggcttagcccccaaggaagaggaccagtttttccccagcaccaccatcaaggcctcgaggctcccagctccctctacagcctgtggactgacttagggaatcccgaacgatgacagaaaaggaggtgctggagtcccctaagccctccttcccagcagagactcggcaaagtgggctacagcggctaaagcagttactcaggaagggttctacagggacaaaggagatggaacttcccccagagccccaggccaatggggaggcagtgggagctgggggtgggcccatctactacatctatgaggaagaggaagaggaagaagaggaggaggaggagccacccccagaacctcctaagctggtcaacgataagccccacaaattcaaagatcacttcttcaagaagccaaagttctgtgatgtctgtgcccggatgattgttctcaacaacaagtttgggcttcgctgtaagaactgcaaaaccaacatccatgaacactgtcagtcctatgtggaaatgcagagatgcttcggcaagatcccacctggtttccatcgggcctatagttccccactctacagcaaccagcagtacgcttgtgtcaaagatctctctgctgccaatcgcaatgatcctgtgtttgaaaccctgcgcactggggtgatcatggcaaacaaggaacggaagaagggacaggcagataagaaaaatcctgtagcagccatgatggaggaggagccagagtcggccagaccagaggaaggcaaaccccaggatggaaaccctgaaggggataagaaggctgagaagaagacacctgatgacaagcacaagcagcctggcttccagcagtctcattactttgtggctctctatcggttcaaagccctggagaaggacgatctggatttcccgccaggagagaagatcacagtcattgatgactccaatgaagaatggtggcgggggaaaatcggggagaaggtcggatttttccctccaaacttcatcattcgggtccgggctggagaacgtgtgcaccgcgtgacgagatccttcgtggggaaccgcgagatagggcagatcactctcaagaaggaccagatcgtggtgcagaaaggagacgaagcgggcggctacgtcaaggtctacaccggccgcaaggtggggctgtttcccaccgactttctagaggaaatttaggtgtgcgggcgcctgcaagcgggagacacccacaccccattctgggcgggcccagtggagtttggggaggggggcgaaagcaacgggactgctgggagaggaggggtaggaaggcccgcctgagcgcgacggggcttccgggaagggactggttctcgcccccttccccagcctggggcctcggatacctgctgcccagagcagcccggacccgaaacctttcaggccccgcttgcaagagctggaaaaaaacgcgtatctactaggaggagccagggactggggcggggggcgggggcgagggagggcgaactgtcgaatgttgcgaatttattaaacttttgacaaaacttaaaaaaaaaaaa

SEQ ID NO: 57 - DNA, 474 bp, Homo sapiens
  CDS (25)..(459)
gcacagactcagagagaacccaccatggtgctgtctcctgccgacaagaccaacgtcaaggccgcctggggtaaggtcggcgcgcacgctggcgagtatggtgcggaggccctggagaggatgttcctgtccttccccaccaccaagacctacttcccgcacttcgacctgagccacggctctgcccaggttaagggccacggcaagaaggtggccgacgcgctgaccaacgccgtggccaacgtgggacgacatgcccaacgcgctgtccgccctgagcgacctgcacgcgcacaagcttcgggtggacccggtcaacttcaagctcctaagccactgcctgctggtgaccctgggccgcccacctccccgccgagttcaccccctgcggttgcaacgttctccctggggacaagttcctggttttttgttgagcaccgtgttgactgcaaatacctttaaagtttgagcttg

SEQ ID NO: 58 - DNA, 4843 bp, Homo sapiens
  CDS (581)..(4321)
cccgaggctcatttccatgcaaagagcctgacatcagagcaccttttgttgctaaacgctttctttagcctcgagggagagagtcatgtggagctggaagagctcattttgaagagaggggtcccggggagctccctccaagatctagaggctccgcggccacccctgccgggtcctgccaagacttgctagaaggaacgagtcgcgtgccttagttagttggttcccgtcacaggaagaaacgcctttgcagtgggtttaattgcttctgggccgagcgaattccccgccgtacaactcagtggtgcggactttgcctcctgctaccctgttgctgcgccgagcggggtgggaaagtttctggagttgtcagtcgcgcagcccgtggccacctagacccgaggtgcgggcgcctgcgaagggcccccgcggggtggccggggccgccggggcatgcagcgcgggggcgcggctcggtgacgccgcgggcggggacccggcatccgggcaggctgcgcgcgggtgcggggcgagggcgccgcggggactgggacgcacggcccgcgcgcgggacacggccatggaggacgcgggagcagctggcccggggccggagcctgagcccgagcccgagccggagcccgagcccgcgccggagccggaaccggagcccaagccgggtgctggcacatccgaggcgttctcccgactctggaccgacgtgatgggtatcctggacggttcactgggaaacatcgatgacctggcgcagcagtatgcagattattacaacacctgtttctccgacgtgtgcgagaggatggaggagctgcggaaacggcgggtttcccaggacctggaagtggagaaacccgatgctagccccacgtcacttcagctgcggtcccagatcgaagagtcgcttggcttctgtagcgccgtgtcaaccccagaagtggaaagaaagaaccctcttcataaatcaaactcagaagacagctctgtaggaaaaggagactggaagaagaaaaataagtatttctggcagaacttccgaaagaaccagaaaggaataatgagacagacttcaaaaggagaagacgttggttatgttgccagtgaaataacgatgagcgatgaggagcggattcagctaatgatgatggtcaaagaaaagatgatcacaattgaggaagcacttgctaggctcaaggaatacgaggcccagcaccggcagtcggctgccctggaccctgctgactggccagatggttcttacccaacgtttgatggctcatcaaactgcaattcaagagaacaatcggatgatgagactgaggagtcggtgaagtttaagaggttacacaagctggtaaactccactcgcagagtcagaaagaaactaattagggtggaagaaatgaaaaaacccagcactgaaggtggggaggagcacgtgtttgagaattcgccggtcctggatgaacggtccgccctctactctggcgtgcacaagaagccccttttctttgatggctctcctgagaaacctcccgaagatgactcagactctctcaccacgtctccatcctccagcagcctggacacctggggggctggccggaagttggtcaaaaccttcagcaaaggagagagccggggcctgattaagccccccaagaagatggggacattcttctcctacccagaagaagaaaaggcccagaaagtgtcccgctccctcaccgagggggagatgaagaagggtctcgggtccctaagccacgggagaacctgcagttttggaggatttgacttgacgaatcgctctctgcacgttggcagtaataattctgacccaatgggtaaagaaggagactttgtgtacaaagaagtcatcaaatcacctactgcctctcgcatctctcttgggaaaaaggtgaaatcagtgaaagagacgatgagaaagagaatgtctaaaaaatacagcagctctgtctctgagcaggactcgggccttgatggaatgcctggctcccctccgccttcacagcccgaccccgaacacttggacaagcccaagctcaaggccgggggttctgtagaaagtcttcgcagttctctcagtgggcagagctccatgagcggtcaaacagtgagcaccactgattcctcaaccagcaaccgggaaagcgtcaagtcggaagatggggatgacgaagagccgccttaccgaggcccgttctgcgggcgtgccagggtgcacaccgacttcacccccagtccctatgacacagactcactcaagctcaagaaaggagatatcatcgatataatcagcaagccacccatggggacctggatgggcctgctgaacaacaaagtcggcacgttcaagttcatctacgtggacgtgctcagtgaagacgaggagaaacccaaacgccccaccaggaggcgtcggaaaggacgaccaccccagcccaagtctgtggaggatctcctggatcggattaacctaaaagagcacatgcccactttcctgttcaatggatatgaagatttggacacctttaagctgctggaggaggaagacttggatgagttaaatatcagggacccggaacacagagctgttctcttgacagcagtggagctgttacaagagtatgacagtaacagcgaccagtcaggatcccaggagaagctgctcgttgacagccagggcctgagtggatgctcaccccgagactcaggatgctacgaaagcagtgagaacctggaaaacggcaagactcggaaagctagcctcctatctgccaagtcatccaccgagcccagcttgaagtcttttagcagaaaccagttgggcaattacccaacattgcctttaatgaaatcaggggatgcactgaagcagggacaggaggagggcaggctgggtggtggccttgccccagacacgtccaagagctgtgacccacctggtgtgactggtttgaataaaaaccgaagaagcctcccagtttccatctgccggagctgtgagaccctggagggcccccagactgtggacacttggccccgatcccattccctggatgaccttcaagtggagcctggtgctgagcaagacgtgcctaccgaggtgacagaaccgccccctcagattgtacctgaagtgccacagaagacgaccgcctcttccacgaaggcccagcccctggagcaagactctgctgtcgacaatgcattgctactgacccaaagcaagagattttctgaacctcagaaattgacaactaagaaactggagggctcaatcgcagcctctggtcgcggcctgtcaccccctcagtgtttgcccagaaactatgatgctcagcctcctggagctaaacacggtttagcaaggacgcctctggagggccacagaaaaggacacgagtttgaaggaacacaccatcccctgggcaccaaagaaggggtagatgctgagcagagaatgcagcccaaaattccatcacagcctccacctgttcctgccaaaaagagcagagaacgccttgctaacggactccaccctgttcccatgggccccagtggggccctccccagtcccgatgcgccatgcctgccagtgaaaaggggcagccccgccagccccaccagccctagcgactgtcccccagcactggctcccaggcctctctcagggcaggcgcctggcagcccaccaagcacaaggccgcccccctggctctcagagctccccgagaacacaagcctccaggagcacggtgtgaagctgggcccggctttgaccaggaaggtctcctgtgcccggggagtggatctagaaacgctcactgaaaacaagctgcacgctgaaggcatcgatctcacggaggagccgtattctgataagcatggccgctgtgggattcctgaagccctggtgcagagatacgcagaggacttggatcagcccgagcgggacgtcgccgccaacatggaccagatccgggtgaagcagcttcggaagcagcaccgcatggcgattccaagtggtggactcacggaaatctgccgaaagcccgtctctcctgggtgcatttcgtctgtgtcagattggctcatttccatcggtctgcccatgtacgccggcaccctctccaccgcgggcttcagcacactgagccaagtgccttctctgtctcacacttgccttcaggaggccggcatcacagaggagagacacataagaaagctcctatctgcagccagactcttcaaactgccgccaggccctgaggccatgtagccaggcccggaatgggcctctctggacaagagccaccctttcactgtgcatatgatgctgatgcaattcctccatcatctctggacgtgcagaccagatccagaagaaaggcctggcgtgtggccaaacagcgtgaaaccttggcacaggactgaggatcctctcctccagaaaagccccctcgaggaaataaattagtgcggttctctttgacctccaaagacaagacaagcacttatttttattttcagaagacaaaagaaccaagatgccaactggctgcgaatgctctatctccagtctgtctctgtgtactggtagaggctgggaggagtagggggcagcctgttccatttctgatagtgcccttgctcttctgtctgtcatcttgcaggatgcccgagggccagatgggcttagctaggccaaagtaacagactcaagagttattgtacattactgaccacgctcatttgttcaaaagttagaacatctggctgcaccaggaaaaaaaaaaaa

SEQ ID NO: 59 - DNA, 2674 bp, Homo sapiens
  CDS (35)..(2599)
gcacgagctctcctgtacctgggcatccagaaaaatggtggtgatggcgcgactttcgcggcccgagcggccggaccttgtcttcgaggaagaggacctcccctatgaggaggaaatcatgcggaaccaattctctgtcaaatgctggcttcgctacatcgagttcaaacagggcgccccgaagcccaggctcaatcagctatacgagcgggcactcaagctgctgccctgcagctacaaactctggtaccgatacctgaaggcgcgtcgggcacaggtgaagcatcgctgtgtgaccgaccctgcctatgaagatgtcaacaactgtcatgagagggcctttgtgttcatgcacaagatgcctcgtctgtggctagattactgccagttcctcatggaccaggggcgcgtcacacacacccgccgcaccttcgaccgtgccctccgggcactgcccatcacgcagcactctcgaatttggcccctgtatctgcgcttcctgcgctcacacccactgcctgagacagctgtgcgaggctatcggcgcttcctcaagctgagtcctgagagtgcagaggagtacattgagtacctcaagtcaagtgaccggctggatgaggccgcccagcgcctggccaccgtggtgaacgacgagcgtttcgtgtctaaggccggcaagtccaactaccagctgtggcacgagctgtgcgacctcatctcccagaatccggacaaggtacagtccctcaatgtggacgccatcatccgcgggggcctcacccgcttcaccgaccagctgggcaagctctggtgttctctcgccgactactacatccgcagcggccatttcgagaaggctcgggacgtgtacgaggaggccatccggacagtgatgaccgtgcgggacttcacacaggtgtttgacagctacgcccagttcgaggagagcatgatcgctgcaaagatggagaccgcctcggagctggggcgcgaggaggaggatgatgtggacctggagctgcgcctggcccgcttcgagcagctcatcagccggcggcccctgctcctcaacagcgtcttgctgcgccaaaacccacaccacgtgcacgagtggcacaagcgtgtcgccctgcaccagggccgcccccgggagatcatcaacacctacacagaggctgtgcagacggtggaccccttcaaggccacaggcaagccccacactctgtgggtggcgtttgccaagttttatgaggacaacggacagctggacgatgcccgtgtcatcctggagaaggccaccaaggtgaacttcaagcaggtggatgacctggcaagcgtgtggtgtcagtgcggagagctggagctccgacacgagaactacgatgaggccttgcggctgctgcgaaaggccacggcgctgcctgcccgccgggccgagtactttgatggttcagagcccgtgcagaaccgcgtgtacaagtcactgaaggtctggtccatgctcgccgacctggaggagagcctcggcaccttccagtccaccaaggccgtgtacgaccgcatcctggacctgcgtatcgcaacaccccagatcgtcatcaactatgccatgttcctggaggagcacaagtacttcgaggagagcttcaaggcgtacgagcgcggcatctcgctgttcaagtggcccaacgtgtccgacatctggagcacctacctgaccaaattcattgcccgctatgggggccgcaagctggagcgggcacgggacctgtttgaacaggctctggacggctgccccccaaaatatgccaagaccttgtacctgctgtacgcacagctggaggaggagtggggcctggcccggcatgccatggccgtgtacgagcgtgccaccagggccgtggagcccgcccagcagtatgacatgttcaacatctacatcaagcgggcggccgagatctatggggtcacccacacccgcggcatctaccagaaggccattgaggtgctgtcggacgagcacgcgcgtgagatgtgcctgcggtttgcagacatggagtgcaagctcggggagattgaccgcgcccgggccatctacagcttctgctcccagatctgtgacccccggacgaccggcgcgttctggcagacgtggaaggactttgaggtccggcatggcaatgaggacaccatcaaggaaatgctgcgtatccggcgcagcgtgcaggccacgtacaacacgcaggtcaacttcatggcctcgcagatgctcaaggtctcgggcagtgccacgggcaccgtgtctgacctggcccctgggcagagtggcatggacgacatgaagctgctggaacagcgggcagagcagctggcggctgaggcggagcgtgaccagcccttgcgcgcccagagcaagatcctgttcgtgaggagtgacgcctcccgggaggagctggcagagctggcacagcaggtcaaccccgaggagatccagctgggcgaggacgaggacgaggacgagatggacctggagcccaacgaggttcggctggagcagcagagcgtgccagccgcagtgtttgggagcctgaaggaagactgacccgtccctcccccatcccccctccccaccccctccccaatacagctacgtttgtacatcaaaaaaaaaaaa

SEQ ID NO: 60 - DNA, 6768 bp, Homo sapiens
  CDS (88)..(2400)
agggcttgatgactataatgggcccagttgtctgcgggctgcggggagctaagtccccagattggaggaggctggctctggtcttcgatgcacaggagtggccgttatggaacgcagcagcagcgtgcagggtcaaagacagccggccccccatgtcagtggtctaggatggccagtgaaggcaccaacatcccaagtcctgtggtgcgccagattgacaagcagtttctgatttgcagtatatgcctggaacggtacaagaatcccaaggttctcccctgtctgcacactttctgcgagaggtgcctgcagaactacattcctgcccacagtttaaccctctcctgcccagtgtgccgccagacctccatcctgcccgagaaaggggtggccgcgctccagaacaatttcttcatcacaaacctgatggacgtgctgcagcgaactccaggcagcaacgctgaggagtcttccatcctggagacagtcactgctgtggctgcgggaaagcctctctcttgcccaaaccacgatgggaatgtgatggaattttactgccagtcctgtgagactgccatgtgtcgggagtgcacggagggggagcacgcagagcaccccacagttccactcaaggatgtggtggaacagcacaaggcctcgctccaggtccagctggatgctgtcaacaaaaggctcccagaaatagattctgctcttcagttcatctctgaaatcattcatcagttaaccaaccaaaaggccagcatcgtggatgacattcattccacctttgatgagctccagaagactttaaatgtgcgcaagagtgtgctgcttatggaattggaggtcaactatggcctcaaacacaaagtcctccagtcgcagctggatactctgctccaggggcaggagagcattaagagctgcagcaacttcacagcgcaggccctcaaccatggcacggagaccgaggtcctactggtgaagaagcagatgagcgagaagctgaacgagctggccgaccaggacttccccttgcacccgcgggagaacgaccagctggatttcatcgtggaaaccgaggggctgaagaagtccatccacaacctcgggacgatcttaaccaccaacgccgttgcctcagagacagtggccacgggcgaggggctgcggcagaccatcatcgggcagcccatgtccgtcaccatcaccaccaaggacaaagacggtgagctgtgcaaaaccggcaacgcctacctcaccgccgaactgagcacccccgacgggagcgtggcagacggggagatcctggacaacaagaacggcacctatgagtttttgtacactgtccagaaggaaggggactttaccctgtctctgagactctatgaccagcacatccgaggcagcccgtttaagctgaaagtgatccgatccgctgatgtgtctcccaccacagaaggcgtgaagaggcgcgttaagtccccggggagcggccacgtcaagcagaaagctgtgaaaagacccgcaagcatgtacagcactggaaaacgaaaagagaatcccatcgaagacgatttgatctttcgagtgggtaccaaaggaagaaataaaggagagtttacaaatcttcagggggtagctgcatctacaaatggaaagatattaattgcagacagtaacaaccaatgtgtgcagatattttccaatgatggccagttcaaaagtcgttttggcatacggggacgctctccggggcagctgcagcggcccacaggagtggctgtacatcccagtggggacataatcattgccgattatgataataaatgggtcagcattttctcctccgatgggaaatttaagacaaaaattggatcaggaaagctgatgggacccaaaggagtttctgtggaccgcaatgggcacattattgttgtggacaacaaggcgtgctgcgtgtttatcttccagccaaacgggaaaatagtcaccaggtttggtagccgaggaaatggggacaggcagtttgcaggtccccattttgcagctgtaaatagcaataatgagattattattacagatttccataatcattctgtcaaggtgtttaatcaggaaggagaattcatgttgaagtttggctcaaatggagaaggaaatgggcagtttaatgctccaacaggtgtagcagtggattcaaatggaaacatcattgtggccgactggggaaacagcaggatccaggtttttgatgggagtggatcatttttgtcctacattaacacatctgctgacccactctatggcccccaaggcctggccctaacttcagatggtcatgttgtggttgcagactctggaaatcactgtttcaaagtctatcgatacttacagtaatggtgggcaggtggatacccgcttccatggtcttgcactataaactggaatggatttctcaatgcgggaccagattatgactagagtttttatgccagaaggaatcattggtgaactttccaaggttatttctgaatgtaacaatttccttaaaaatgacttatccaatttctgtatttcacctttagggttaaaaaaaactcttctactgaatctataaaaactgcagttttacatctgtgaactatggcttaagggacaggatttatgtagctaaactaattttgcaaatcaaacagacacttaaaaaactagcatatgtaaaggtattcgttaatcctgtgaatggtagcttttgcacagaacttccaaaagcaaaacaaaaacaaaatctattgtagttatatacttcatttaacctaggtcacaagacccagggaatcttctaacctcacttttacagtaggtattactcttgtgacatttttttggttatcaacaactaaatataaattactttggaaaaagtaaggctgtcttgcaaaatgatcccagctctgattagcagccctctggagttcagaacttaagtatcagtgcaaatttctcaacctttctgggttagacaaagatccttttttgtgtgttcttttcaccacccctttggctcaccttgtatcagcaaacaaagtacttcttcagggaaacctgaaatttctaatgccttgaaaagcatattacaaaagtaatgctaccttttgggaaacaaactgccccgttaactccagatcattgcactggaatgtaatcaagaaagttagtcatgttttatgtaccatgttttcacacgtgtctcttctcttcgacttcctgaaagcgaaagctttacctcctgcaaatgtcagcacatgtagtaggacaccagtatcctaggacagagagccataagtagccctttggaggactgatggtgtcaaccaaaggcatgtgattgattaatgattcccccttagaaagcaagtgttaccaaagttgtgttatcttgaaagcattacaggtaagggcatgttatggttatttatcattgtttaatgaatagtagaggtgtcaagggactatgtatacatgattagggtaagatagaatgtattatatatatatatatatatacacacacacatatatatagctgaatctttggtgtattgaaataggcagcactctgaaagacagaagcttcgtccagccactcttcagcacattcctttactaagcagtttaaagccgtcctagtggagcaagccctaaagcagatttaatttttgccattttccaagaatgacggtggtggcttttagtcagaaaatggccttctgtgctttcaaaaaaaaaaaaaaaaaaaaaaccacacacacacataaaaaacccaacaggtcaaaataaaagttgaacttgagttacatttaatttaaatataaatgcattttgagaaatgttaagaacaatttagtcaatcgttcatctgtcattggtactgtaaaataagctgtggtctatttccactgtttaattttctactcagttctaccaaataggatgtcatgtttgacatttttgatagtgactttggggtcttcttcactgaaagcaccttagaactgtactataagaaaacatttcccctatgtataattatatgaatgtgatgtttattgcttattaatttataattcagtcattctctatataggacttcttaaaatttagaagggaaatctagctacttcaaattgtctgttaaatttattatgcccaaatcaacctctgaaaaaaggtttttccaggaagatttacatttaggtttaatatttttttagttaggtagagttttaaaaaatacttgagcctgtccgtgataaagctataaaattcaataactttttagaatgttaaatgaagacactgtttcctaacatcagtgagatacatctttgaatttaaacattcatatttactgagtacctactaggtaccaagtactcttttaggcactggaaatacagtgatggacaaaacaggtaaaaaatcgctgccccctcagagctgacattctggggtgggaatttcattttgccacgtactaacgttctgcacaaaagacaggctagactcttgtctagattgtttaaaagaaacttttcaaattggttacattaattttagtttattttcacaagtaaaaatggctttttatttagattctttctgtcccaggctgttgatcttaaaactagttgatttaaagagtttttttgcacaacatttcaattatatttgtgaacttagaaattaacttacaatctaaccagccatcatatcatatcctatcaggctagatatctcaatagtagactgaatacaaagctaattttttttacatgtcaatattggcacaaactggaatgaaagaatagtttgattcagacctgctccactatgtgttgctaaaacacatgctatgagcactccaggaaacactatattttttccaaaaaatatgtgattatatatgttaaagtatagataacatttcacacttggatacatatgtgcatttactgtatttcttggtaagcatatttttgggggaaagtgctgctgatatgatacaagtagacaaaatttaaatgaaattttgtcacattctatggaaaatggtttctggtaaactgagaaggatattaaaataagtggcttttttctgggctaccattattgtttgatttctctttgtcaagtgtatagaacctgtcatacattcatgataagtagcactgaaaaattactcattcaaatttcccctgggcacgtaaggcaaaatattgccggttgggatttcaaggtcagtgacgacgcatttcctcccagtacagaccccccagccccccttgctggacatggggaggcagagagtcacttgaccatccagaaatacatgactacaagtcctttatgactgtttgccattttttttaatggtacttagtattttgatcaaactttagtctccagaactaaacaagtccctaagtttccttattttaatttactgtgactagatttgaagcaaataaatactccagatccatgcagctagaacacacttgcttccactactaaatatacagggtatgtcctaacatggagttaactggaatagcagtacactagcaagtatctgtgaatccttagcactgacgggttaacagaaatgctttggtaatacctacttagttaattggaggaagtagtaaataaacattaggtaatctgcagattacttcaaatgggaaaaatctttttgtagactctatagtaccctctctattcactagcttctgaaaagggaggagtatttttagtttgacaatttaataatttaaaaacaagacatctccaggtaggaaaaaatgaaagctatttcatgcaaacattatctaatttagcttaaaagtgaaagtggtaatactgttggtttctgtaaatgttgcagggttttaaactttataattactttaatatttttgataactagaaatctagtattgccataaaggaaactaagtgcccatcaaagatttgtttggtataaataaagaattatttgttttgttttcaatgacagtaagctacaaatcatgatgcttaaaaactttctaaagatgaattgtgtggcagtgattggtctgtttgtggagaatgtatgaaagctattaatattctagaatagattaataaattggctatgttgttccaatgaatgtacagcacttccattaacttttgaaagcaacacagccttaaactcaatgcttttgctttatgacatgggaatgttctgtcatcaatggagtgtattcttgtaatagaattctttatatcgttctcaattctatagactttcaagcctatgtatgaatatgaaggggtttttttttttttgctttgttttctttttagattttgtacattccatctttataggtctgtttcatatgttttatgtatagaacactaagtcttgcactctctgacattgatactgatatattctcgtcatttgttcttttatgaatcaaaatgttgactgcctatttaaagaaaagaatgaacgctgtgcatcaaagtgtttgtatgttcgtagctacatacgtaccacagtattttggatgctttagtctacaatgaaactttcaattaattctgtcttgaaacataggagaaacaggattcatgtgtatctctttaccatgcacaaaatctcaaatcattataataaagcttgttttctccaaaaaaaaaaaa

SEQ ID NO: 61 - DNA, 1611 bp, Homo sapiens
  CDS (646)..(813)
tcgcgatctagaaccccccatactccttacactattcctcatcacccaactaaaaatattaaacacaaactaccacctacctccctcaccaaagcccataaaaataaaaaattataacaaaccctgagaaccaaaatgaacgaaaatctgttcgcttcattcattgcccccacaatcctaggcctacccgccgcagtactgatcattctatttccccctctattgatccccacctccaaatatctcatcaacaaccgactaatcaccacccaacaatgactaatcaaactaacctcaaaacaaataataaccatacacaacactaaaggacgaacctgatctcttatactagtatccttaatcatttttattgccacaactaacctcctcggactcctgcctcactcatttacaccaaccacccaactatctataaacctagccatggccatccccttatgagcgggcgcagtgattataggctttcgctctaagattaaaaatgccctagcccacttcttaccacaaggcacacctacaccccttatccccatactagttattatcgaaaccatcagcctactcattcaaccaatagccctggccgtacgcctaaccgctaacattactgcaggccacctactcatgcacctaattggaagcgccaccctagcaatatcaaccattaaccttccctctacacttatcatcttcacaattctaattctactgactatcctagaaatcgctgtcgccttaatccaagcctacgttttcacacttctagtaagcctctacctgcacgacaacacataatgacccaccaatcacatgcctatcatatagtaaaacccagcccatgacccctaacaggggccctctcagccctcctaatgacctccggcctagccatgtgatttcacttccactccataacgctcctcatactaggcctactaaccaacacactaaccatataccaatgatggcgcgatgtaacacgagaaagcacataccaaggccaccacacaccacctgtccaaaaaggccttcgatacgggataatcctatttattacctcagaagtttttttcttcgcaggatttttctgagccttttaccactccagcctagcccctaccccccaattaggagggcactggcccccaacaggcatcaccccgctaaatcccctagaagtcccactcctaaacacatccgtattactcgcatcaggagtatcaatcacctgagctcaccatagtctaatagaaaacaaccgaaaccaaataattcaagcactgcttattacaattttactgggtctctattttaccctcctacaagcctcagagtacttcgagtctcccttcaccatttccgacggcatctacggctcaacattttttgtagccacaggcttccacggacttcacgtcattattggctcaactttcctcactatctgcttcatccgccaactaatatttcactttacatccaaacatcactttggcttcgaagccgccgcctgatactggcattttgtagatgtggtttgactatttctgtatgtctccatctattgatgagggtcttaaaaaaaaaaaa

SEQ ID NO: 62 - DNA, 2780 bp, Homo sapiens
  CDS (94)..(2502)
cgcggctggaggtgtgaggatccgaacccaggggtggggggtggaggcggctcctgcgatcgaaggggacttgagactcaccggccgcacgccatgagggccctgtgggtgctgggcctctgctgcgtcctgctgaccttcgggtcggtcagagctgacgatgaagttgatgtggatggtacagtagaagaggatctgggtaaaagtagagaaggatcaaggacggatgatgaagtagtacagagagaggaagaagctattcagttggatggattaaatgcatcacaaataagagaacttagagagaagtcggaaaagtttgccttccaagccgaagttaacagaatgatgaaacttatcatcaattcattgtataaaaataaagagattttcctgagagaactgatttcaaatgcttctgatgctttagataagataaggctaatatcactgactgatgaaaatgctctttctggaaatgaggaactaacagtcaaaattaagtgtgataaggagaagaacctgctgcatgtcacagacaccggtgtaggaatgaccagagaagagttggttaaaaaccttggtaccatagccaaatctgggacaagcgagtttttaaacaaaatgactgaagcacaggaagatggccagtcaacttctgaattgattggccagtttggtgtcggtttctattccgccttccttgtagcagataaggttattgtcacttcaaaacacaacaacgatacccagcacatctgggagtctgactccaatgaattttctgtaattgctgacccaagaggaaacactctaggacggggaacgacaattacccttgtcttaaaagaagaagcatctgattaccttgaattggatacaattaaaaatctcgtcaaaaaatattcacagttcataaactttcctatttatgtatggagcagcaagactgaaactgttgaggagcccatggaggaagaagaagcagccaaagaagagaaagaagaatctgatgatgaagctgcagtagaggaagaagaagaagaaaagaaaccaaagactaaaaaagttgaaaaaactgtctgggactgggaacttatgaatgatatcaaaccaatatggcagagaccatcaaaagaagtagaagaagatgaatacaaagctttctacaaatcattttcaaaggaaagtgatgaccccatggcttatattcactttactgctgaaggggaagttaccttcaaatcaattttatttgtacccacatctgctccacgtggtctgtttgacgaatatggatctaaaaagagcgattacattaagctctatgtgcgccgtgtattcatcacagacgacttccatgatatgatgcctaaatacctcaattttgtcaagggtgtggtggactcagatgatctccccttgaatgtttcccgcgagactcttcagcaacataaactgcttaaggtgattaggaagaagcttgttcgtaaaacgctggacatgatcaagaagattgctgatgataaatacaatgatactttttggaaagaatttggtaccaacatcaagcttggtgtgattgaagaccactcgaatcgaacacgtcttgctaaacttcttaggttccagtcttctcatcatccaactgacattactagcctagaccagtatgtggaaagaatgaaggaaaaacaagacaaaatctacttcatggctgggtccagcagaaaagaggctgaatcttctccatttgttgagcgacttctgaaaaagggctatgaagttatttacctcacagaacctgtggatgaatactgtattcaggcccttcccgaatttgatgggaagaggttccagaatgttgccaaggaaggagtgaagttcgatgaaagtgagaaaactaaggagagtcgtgaagcagttgagaaagaatttgagcctctgctgaattggatgaaagataaagcccttaaggacaagattgaaaaggctgtggtgtctcagcgcctgacagaatctccgtgtgctttggtggccagccagtacggatggtctggcaacatggagagaatcatgaaagcacaagcgtaccaaacgggcaaggacatctctacaaattactatgcgagtcagaagaaaacatttgaaattaatcccagacacccgctgatcagagacatgcttcgacgaattaaggaagatgaagatgataaaacagttttggatcttgctgtggttttgtttgaaacagcaacgcttcggtcagggtatcttttaccagacactaaagcatatggagatagaatagaaagaatgcttcgcctcagtttgaacattgaccctgatgcaaaggtggaagaagagcccgaagaagaacctgaagagacagcagaagacacaacagaagacacagagcaagacgaagatgaagaaatggatgtgggaacagatgaagaagaagaaacagcaaaggaatctacagctgaaaaagatgaattgtaaattatactctcaccatttggatcctgtgtggagagggaatgtgaaatttacatcatttctttttgggagagacttgttttggatgccccctaatccccttctcccctgcactgtaaaatgtgggattatgggtcacaggaaaaagtgggttttttagttgaattttttttaacattcctcatgaatgtaaatttgtactatttaactgactattcttgatgtaaaatcttgtcatgtgtataaaaataaaaaagatcccaaataaaaaaaaaaaa

SEQ ID NO: 63 - DNA, 682 bp, Homo sapiens
  CDS (61)..(306)
  misc_feature (1)...(682): n = a,t,c or g
cgaacgagtcaaccggatcggtgactgtggagggcgagctgagccctggccgccgccacaatgggccgcgagtttgggaatctgacgcggatgcggcatgtgatcagctacagcttgtcaccgttcgagcagcgcgcctatccgcacgtcttcactaaaggaatccccaatgttctgcgccgcattcgggagtctttctttcgcgtggtgccgcagtttgtagtgttttatcttatctacacatgggggactgaagagttcgagagatccaagaggaagaatccagctgcctatgaaaatgacaaatgagcaacgcatccggatgacggttccctgtctctgaaagacctttctctgaaagaggagtctgcattgtagtgtctcaaagacacaataaacttcctatggtctgcactgttgtgatattacatttttgtgagtagaatcctgtgtgaccactaatattcaagttcatgaagcgcccctcctcagcatgagtcttgaagttttgcctggtctcgggttttggtgaaagagcagggctccccctttgttccattatctacaagaaagtagctgcaggtactcctgcatctaaccatttgtgggtgacatgggctatggcgagtgctggttcttggccctctgctcccatagcaacaataaagttcaccggcnanan

SEQ ID NO: 64 - DNA, 464 bp, Homo sapiens
  CDS (143)..(412)
catctgtgcacgagtggaggaagaaacgggaaatacctacccactgtgcaggggcaaaaacattctatatgcctgtgacaaaccagagtttgttccacccccccatttaaagggcaagacaaccacaggcctctacatcaaaatgacggtccaatggggtgtccagcaagccccatcgcccttccaaagcccactccactcagagacagtcatcagtcatgccagaggccccaacatcctcccaaatgatgataaaaatcacactcttggaaccacaaattgtggtcaggcatggtggcttatgtacgtaatcccaaaaatttgggaggccaaggaaggaaaatcacttgaggccaggagctcaggaccagcctgggcaacaaagcaagaccccatctctacaatcaatcaataaaatttttttaaaaagacttgcaaattgccatggcaggtgtggtgctgcc

SEQ ID NO: 65 - DNA, 1420 bp, Homo sapiens
  CDS (98)..(958)
gagagcctgatgtctcccacagcctgctaaagcgagcagtcctcagggttttgatgtggatcgagatgccaaaaagctgaacaaagcctgcaaaggaatggggaccaatgaagcagccatcattgaaatcttatcgggcaggacatcagatgagaggcaacaaatcaagcaaaagtacaaggcaacgtacggcaaggagctggaggaagtactcaagagtgagctgagtggaaacttcgagaagacagcgttggcccttctggaccatcccagcgagtacgccgcccggcagctgcagaaggctatgaagggtctgggcacagatgagtccgtcctcattgagttcctgtgcacgaggaccaataaggaaatcatcgccattaaagaggcctaccaaaggctatttgataggagcctcgaatcagatgtcaaaggtgatacaagtggaaacctaaaaaaaatcctggtgtctctgctgcaggctaatcgcaatgaaggagatgacgtggacaaagatctagctggtcaggatgccaaagatctgtatgatgcaggggaaggccgctggggcactgatgagcttgcgttcaatgaagtcctggccaagaggagctacaagcagttacgagccacctttcaagcctatcaaattctcattggcaaagacatagaagaagccattgaagaagaaacatcaggcgacttgcagaaggcctatttaactctcgtgagatgtgcccaggattgtgaggactattttgctgaacgtctgtacaagtcgatgaagggtgcggggaccgatgaggagacgttgattcgcataatcgtgaccagggccgaggtggaccttcaggggatcaaagcaaagttccaagagaagtatcagaagtctctctctgacatggttcgctcagatacctccggggacttccggaaactgctagtagccctcttgcactgagccaagccagggcaataggaacacagggtggaaccacctttgtcaagagcacattccaaatcaaacttgcaaatgagactcccgcacgaaaacccttaagagtcccggattactttcttggcagcttaagtggcgcagccaggccaagctgtgtaagttaagggcagtaacgttaagatgcgtgggcagggcaccttgaactctggcttagcaagcatctaggctgcctcttcactttcttttagcatggtaactggatgttttctaaacactaatgaaatcagcagttgatgaaaaaactatgcatttgtaatggcacatttagaaggatatgcatcacacaagtaaggtacaggaaagacaaaattaaacaatttattaattttccttctgtgtgttcaatttgaaagcctcattgttaattaaagttgtggattatgcctctaaaaaaaaaaaaaa

SEQ ID NO: 66 - DNA, 813 bp, Homo sapiens
  CDS (103)..(648)
tcgacccctccgacccccgccggccgcttcgagcctgagccctttgcaacttcgtcgttccgccgctccagcgtcgccaccgcgcctcgccccgccgccaccatgaccaccgcgtctccctcgcaagtgcgccagaactaccaccaggacgcggaggctgccatcaaccgccagatcaacctggagttgtatgcctcctacgtctatctgtctatgtcttgttattttgaccgagatgatgtggctctgaagaactttgccaaatactttctccaccaatctcatgaggagagggagcatgccgagaaactgatgaagctgcagaaccagcgaggtggccgaatcttcctgcaggatataaagaaaccagaccgtgatgactgggagagcgggctgaatgcaatggagtgtgcactgcacttggaaaagagtgtgaatcagtcactactggaactgcacaaactggctactgacaagaatgatccccacttatgtgacttcattgagacgtattatctgagtgaacaggtgaaatccattaaagaactgggtgaccacgtgaccaacttacgcaagatgggtgcccctgaagctggcatggcagaatatctctttgacaagcacaccctgggacacggtgatgagagctaagctgacttccccaaagccacgtgactttactggtcactgaggcagtgcatgcatgtcaggctgccttcatcttttctataagttgcaccaaaacatctgcttaagttctttaatttgtaccatttcttcaaataaagaattttggtacccaaaaaaaaaaaa

SEQ ID NO: 67 - DNA, 810 bp, Homo sapiens
  CDS (122)..(664)
actacagctccgactgtcagtgccggccttcctcgtgtgaggggatctgccggacccctgcaaattcaatttctttcccattccgggcccttccctatcgtcgcccccttcaccttggatcatgttcaagaaatttgatgaaaaagaaaatgtgtccaactgcatccagttgaaaacttcagttattaagggtattaagaatcaattgatagagcaatttccaggtattgaaccatggcttaatcaaatcatgcctaagaaagatcctgtcaaaatagtccgatgccatgaacatatagaaatccttacagtaaatggagaattactcttttttagacaaagagaagggcctttttatccaaccctaagattacttcacaaatatccttttatcctgccacaccagcaggttgataaaggagccatcaaatttgtactcagtggagcaaatatcatgtgtccaggcttaacttctcctggagctaagctttaccctgctgcagtagataccattgttgctatcatggcagaaggaaaacagcatgctctatgtgttggagtcatgaagatgtctgcagaagacattgagaaagtcaacaaaggaattggcattgaaaatatccattatttaaatgatgggctgtggcatatgaagacatataaatgagcctcagaaggaatgcacttgggctaaatatggatattgtgctgtatctgtgtttgtgtctgtgtgtgacagcatgaagataatgcctgtggttatgctgaataaattcaccagatgctaaaattcaaaaaaaaaaaaaaaaa

SEQ ID NO: 68 - DNA, 745 bp, Homo sapiens
  CDS (483)..(572)
cttgagagcttctcattagcctttgcctctgtacagaaacaggctaatgagaaaagggcactccggaaaaagaggaaggccctggagtttgtaactaatcctgatattgctgccaagaaaaaaatgaagaaacacaaaaataaaagtgaagcaaagaagagaaagatagagttcctgcgtccaggatataaggccaagagacaaaaaagccatagcctgaaagatttagcaatggtggagtaatgtctccctgtgctgatacaagcatgaactttctggaatattctgctagtctgaaattacagcaggttgtctggggtaggggggaggcgtttttttttttttttgagacaaggtctcactctgtcacccaaggtggagtgcagtgacgacatcacagctcactgcagcctcaacctgggttcaagtgatcctctcacctcagcctcccaagtagttgtgcctcctaggcacacaacactatgcccggcaaattttttgtattttgtattttttgtagaaacaggatttcgccatgttggccaggctggtctcgaacacctgggctcaactgatccgcctgcctcggcctcccaaagtgctgggattacaggtgtgagccaccctgctcaaccaggttttattatttaagttagttaaactttggatagattgtataatatatagtttaatgtaatcatgctcatattttttaaataaataaaacactatactaaaaaaaaaa

SEQ ID NO: 69 - DNA, 1554 bp, Homo sapiens
  CDS (155)..(1285)
cctgccgcaccagagcacagcgcactagtgggacaggggtcctgactcagacttaactggctgtgtctcgtggtttttcactgtcctggaaaaggcctgaagtggcactgaaatgaggcatagatgagaaacttgaactttacctgatttctgtatgttgtcatcttgcgtacgcccagtccccacgacagtccggtttgtagattccctgatctgcaattcttcccgttccttcatggatttgaaggctctcctttcttccttgaatgactttgcatccctctcgtttgctgagagttgggacaatgttggattactggtggaaccaagcccaccacatactgtaaatacactcttcctgaccaatgacctgactgaggaagtgatggaggaggtgctgcaaaagaaggcagacctcattctctcctaccatccgcctatcttccgacccatgaagcgcataacctggaacacatggaaggagcgcctggtgatccgggctctggagaacagagtcggtatctactctcctcatacagcctatgatgctgcgccccagggcgtcaacaactggttggctaaagggcttggagcttgtacctccaggcccatacatccttccaaagctcccaactaccctacagagggaaaccaccgagtagaattcaacgttaactacacccaagacctggacaaagtcatgtctgcagtgaaaggaattgacggtgtttctgtcacttctttttctgctaggactggtaatgaggaacaaacacggattaatctgaattgtactcagaaggctttgatgcaggtggtagattttctttcccggaacaaacaactttatcagaagacggaaattctgtcactggagaagcctttgcttctacatactggaatgggacggttatgcacactggatgaatctgtctccctggcaaccatgattgatcgaataaaaagacacctaaaactatctcatattcgcttagcccttggggtggggagaaccttagagtctcaagtcaaagtcgtggccctgtgtgctggttctgggagcagcgttctgcagggtgttgaggctgacctttacctcacaggtgagatgtcccatcatgatattttggatgctgcttcccaaggaataaatgtcatcctctgtgaacacagcaacactgaacgaggctttctttctgaccttcgagatatgctggattctcacttggagaataagataaatattatcctatcagagactgacagggaccctcttcaggtggtataattgcagaaacatcaggataacacattctacaaatcagctggatgccaacttaaatttgtaacatgagtcagtgggactggtgtgcttccagagagtgtcttcgagggtatcatcatttccggtttgttaatcttattcaccaaatgttctatcgctcgtaaggtaaaactgtaatataactaccatattaaataacaaatgttcattataaactctaggaaagattgaataaaatctgtttacttaacattaaaaaaaaaaaaaaa

SEQ ID NO: 70 - DNA, 1113 bp, Homo sapiens
  CDS (343)..(660)
  misc_feature (1)...(1113): n = a,t,c or g
ggacgatcttggctcaccgcaacctccgcctactgggttcaagccattctcctgcctcagcttcccaagtagctgggattacaggcatgtgctaccatgcccagctaattttgtatttttagtagagacagggtttctccatgttgctcaggctggtcttgaactcctgacctcaggtgatccgcccgcctcggactcccaaagtgctgggattacaggcatgagccaccatgcctggccggatgtgaattatcttaaaaattttcaggtaattctaatgggccaaggttgagaacccctgctctgggcccatccgagcaccaggctgtcacaaacgcatgcatgcactcacgcccgtgggcttggggggcttcggaaatgtgcttctgcttttttgagatggggtctttctgttgcccatcccggagcacagtggcacgatcacagctcactgcagcctcgacctcctgggctcaggtgatcctcccgcctcagcctcctgagtgtctgcttctggttttcatgatgacctggggcccaggcatactacacttgtgctgttcaggggccagtcctgcaccaggagcccatcagccacagctccgccgagaagcactgatatgcagagctaagcagctttgtttccacgtggatcctgcgtaggttttcttggtccatccgtagacaccgcactcctgcagaggatcttctcgggatgccccactgtctctgttttccctcttcactgaacactcagtcggggctcgccatgatgcctctgtgtctgctggcttctcccccattggaacagccttcttggcacgccacactgctagctgctgggcactgtgctttctgcctttaccgttctgccgtgatgttgccaaaatagcagcaacaacaacaacaacaaaggctgggcacctggctcatgcctgtattcccagcagttcgagatcagcctgggcaacatgccccaactggaccctaggcaaaagtgagtggcactcctctgccaggactccaggcaagccccggcatcttcttgctgccgtcccagacaacagaagttaccagatgaacagacttggatgggccacggnggtggagagc

SEQ ID NO: 71 - DNA, 707 bp, Homo sapiens
  CDS (169)..(552)
ggaagaattaataaagatctttttttttttttttttttgagagacggagtttcactctgtcccccaggctggagtgcagtagtgtgatctcggctcactgcaacttcttgtctccggggttcaagcgattctcctgcctcagcttccctagtagtggggactacaggcatgcaccaccatgtccagctaatttttgtattttttagtagagacggggtttcactatatgttggccaggctggtctcaaacttctgacctcaagtgatccactcaccttggcctcccaaagtgctgggattacagacgtgagccaccatgcccggccaggattttccactcttgaagggagtattttgttgtcacttcaactcgctgttttttttccagacaacctcaaatatgaccacactacagcctgtacacaacaagacagtttatcttgtccatggggtaagtgtatgcctgatctttttaattcagtacaatctctgaaggtgttaacactaatgttttacaagaatgtagaggcgactcggtgctatgaagcgtgttaaacaactcacacaattgctacaaaacaccagggaggggctttttgtgtttttaatttttaaaacatttttccttttcttgtgagccatagtaggcctagagagattactgggtttttataattaaacatttatttcggtgaaaaaaaaaaaaa

SEQ ID NO: 72 - DNA, 990 bp, Homo sapiens
  CDS (84)..(557)
ttacaaatagacgctaaggagggtgatggtggctatgatggtggggatgatgaggctattgtttttctcggcgctcaggaagcatggcactctggcgggcataccagcgggccctggccgctcacccgtggaaagtacaggtcctgacagctgggtccctgatgggcctgggtgacattatctcacagcagctggtggagaggcggggtctgcaggaacaccagagaggccggactctgaccatggtgtccctgggctgtggctttgtgggccctgtggtaggaggctggtacaaggttttggatcggttcatccctggcaccaccaaagtggatgcactgaagaagatgttgttggatcaggggggctttgccccgtgttttctaggctgctttctcccactggattatcctgatgcccttatcaccaactactatctatggcctgctgtgcagttagccaacttctacctggtcccccttcattacaggttggccgttgtccaatgtgttgctgttatctggaactcctacctgtcctggaaggcacatcggctctaagcctgcctcactccatcgtttccaccttgcagtgatgcagcttgaccctggaacggtcagacaacctcctcaaagtgggcataccagtttccacggggttgggttgccggtcagagcttaagaggactagcaccctgcaatgcccctcttcactctaaaatgtacactgactgctttagagcccttgataatagtcttattcccaccacatactaggcactccataaatatctgttgaaccttcatgaccttatcaactttacacccatatcccagcaaatgccactcatccccactcttcatagacacatttgttactctaaccctgcctaggcttcttgtagctccagctctttagagactcccggaaccctttatatggtgcctcagtaaatatgttattaaatatgtaatccggaaaaaaaaaaaa

SEQ ID NO: 73 - DNA, 1143 bp, Homo sapiens
  CDS (121)..(822)
cctttcgttcgacccacgcctccgggacagcagagacaacagtcacagtaaccctgtctagagcgttcctggagcccaagctcctctccacagaggaggacagagcaggcagcagagaccatggggcccccctcagcttgtccccacagagaatgcatcccctggcaggggctcttgctcacagcctcacttttaactttctggaacgcacccaccactgcctggctctttattgcatcagcgccctttgaagttgctgaaggggagaatgttcatctctctgtggtttatctgcccgagaatctctacagctatggctggtacaaagggaaaacggtggagcccaaccagctaatcgcagcatatgtaatagacgacactcacgttaggactccagggcctgcatacagcggtcgagagacaatatcacccagtggagatctgcatttccagaaggtcaccctagaggacacgggatactacaccctacaagtcacatacagaaattctcagattgaacaggcatctcaccatctccgtgtatacgagtcagtggctcagccctccatccaagccagcagcaccacagtcacagagaagggctccgtggtcctgacctgccacacaaataacactggaacctctttccagtggattttcaacacccagcgtctgcaggtcacgaagaggatgaagctgtcctggtttaaccatatgctcaccatagaccccatcaggcaggaggacgctggggagaatcaatgggaggtctccaacccaatcagctccaacaggagcgaccccctcaagctgactggaaaataagatgacacactctaggcattccggacgggcgcctgggttggaggtttctgagggcggcacttggtggtccctgacctccaaaaactgtcaggcccggcgatcgagggacgttagtggcgaaggccccaggcccaccccggccatggaccctttggaagatcatctcttaaatccctagccagcacgaggaactgcttaatatatgagaggggaggaccaagcaacgtgggctcctgcgccgccacgaaccaggaatgagccaccgatgtggcgagcgagcgacgctaacgacgtggcacgtaagcgagcgtgcacggc

SEQ ID NO: 74 - DNA, 2706 bp, Homo sapiens
  CDS (22)..(1575)
aaatttgaataccacagtagcatggagtgtgacctcatggagactgacatcttggagtcgttggaagatctaggttacaagggcccattgttggaagatggagcgctctctcaggcagtctctgctggagccagttcccccgagtttaccaaactctgtgcttggctggtgtctgaattaagagtgctctgtaaactagaggaaaacgtgcaagcaactaacagtccgagtgaagctgaagaattccagcttgaggtgagtgggctactaggggagatgaactgcccgtatctttcactgacatctggggatgtgaccaagcgccttctcattcagaagaactgcctcctcttgctcacatacctcatctcagaactagaagctgccagaatgctctgtgtgaatgctcctccaaaaaaagctcaagaaggaggcggtagtgaggtctttcaagagttgaaaggcatatgtattgctctaggaatgtccaaacctccagccaatataactatgttccaattcttcagcgggattgaaaaaaaattaaaggaaacattagcaaaagttccacctaatcatgtgggaaagcctttactgaagaagccaatgggaccagcccactgggaaaagatagaagcaattaaccaagccatagccaatgaatatgaagtccggagaaagctgctaataaaacgtttggatgtcactgtacaatcctttggctggtctgacagagctaagagccagacagaaaaattagccaaggtttaccagccgaaacgttcagtcttatcccctaaaactactatttctgttgcccatcttttggctgcaaggcaggacttgtcaaagattttaaggacaagcagcggctctataagagaaaagactgcctgtgccatcaataaggtgttgatgggcagggtgcctgacagaggtggtagacccaatgaaatcgaacctccacccccagagatgccaccgtggcagaagaggcaagatggcccccagcagcaaacaggaggccgaggaggagggagaggtggctatgaacattcctcatacggaggacgaggaggtcatgaacaaggaggcgggagaggtggacgtggtggctatgaccatggtggccgagggggaggaagaggaaataagcatcaaggaggctggacagatggagggagtggtggaggaggtggctaccaagatggtggttatcgagattcaggtttccagccaggtggctatcatggtggccacagcagtggtggctatcaaggcggaggttatggtggcttccaaacatcttcttcatatacaggaagtggataccagggtggtggctaccagcaggacaatagataccaagatggcgggcaccatggtgatcgtggtggtggtcgtggtgggcgaggtggtcgtggaggccgaggtggtcgtgcaggccagggaggaggctggggaggaagagggagccagaattatcaccaagggggtcaatttgaacagcatttccagcatggaggttatcagtataatcattctggatttggacagggaagacattacactagttgaggctaccgaaccttacattttgctagagctcaagtaatagaaacttagtttcagaatcctgaattcagcacctattttgaattaatgtgagaccacaggtggcaggcagattcctgcttggcataagcatttgtaggtcttcattcaattctgttagatttttttattggacttacataatgccgtttatttgagaaacacataacatctctcctttctatgaaaaattttttaaaaggtggttaaaattgcctttaattgcccagtagactaattccacagtcagaacatgcaaacttttttgaagaaattacttgaataagtagttttcatgttttcaatatgcagttttgaaaatgaggattcacctagacttttttagatttactactaggaaaccttcctcatatgaataaccatttatatgtgttttgcttaaagtattccaatgcctattttccaagcacagttctgccccccggttgacttttatgccacgtgtgcttcatgatggaacttttaggtcagttcctattaaatgagctcttctgcagatagcacattcagtagccttattttgttgatggaatactgtatcatatgctcaactctgaaaaccttgaacacggccaaaatccataaagattataaaagcaaactaagttgtgaagctatagtacatgtaggcatttagttaagtatagcaattcaaactgacctgcatccatccaaaacaaattcctccttcaaccttatttttacttgaaatttgctagaagaaatagcaaaccgaaatttgttttatgcatgagttaataccactggctcagcaaatacaagttagtttgctttaagcaggtaactttttttgtaatggaagaaatgcactacaaagttaagacagatttttgctaagtgcaggaggccctttattattgctgcagaaaacaaaagcctggctgagttgatgttttacattctcccttactgaaatctacatgacatgatgcttcttgctgggtttttgtacatgtaaacattgtcaagctgtgaaagaaaatggctggaggtgtgctttgtgtgaaaggtgagcaataaagtatctgttaagttctctcaaaaaaaaaa

SEQ ID NO: 75 - DNA, 1602 bp, Homo sapiens
  CDS (15)..(716)
ccacgcgtccgctgatgctgaaagagagcaattttgctgacagttattatgactacatttgtattattgactttgaagccacttgtgaagaaggaaacccaccggagtttgtacatgaaataattgaatttccggttgttttactgaatacgcatactttagaaatagaagacacgtttcagcagtatgtaagaccagagattaacacacagctgtctgatttctgcatcagtctaactggaattactcaggatcaggtagacagagctgataccttccctcaggtactaaaaaaagtaattgactggatgaaattgaaggaattaggaacaaagtataaatactcacttttaacagatggttcttgggatatgagtaagttcttgaacattcagtgtcaactcagcaggctcaaataccctccttttgcgaaaaagtggatcaatattcggaagtcatatggaaatttttacaaggttcctagaagccaaaccaaactgacaataatgcttgaaaaattaggaatggattatgatgggcggcctcactgtggtcttgatgactctaagaatatcgcccgaatagcagttcgaatgcttcaggatgggtgtgaactccgaatcaacgagaaaatgcatgcaggacagctaatgagtgtgtcctcttccttaccaatagagggcactccaccaccacaaatgccacattttagaaagtaacaacagttttgtgtgtggatcattccaattgaagttgctatgaagaggtagcagatgaatctcattgaattagtcctgtagtgcaaactttaagcaccttaaaacatttaaaatcttattacaggtgatagagatagatacatgtatgtgaacagattttgtaggaaggcatactgaattctttgtcaccagcacttttgatatgaacagtattcgttacatagtaacagttcctgcttacaactgaattttataatttaaggtgttcaagatatattctttttggttttaaaatgcaaaatcttattggctgttctgttgaatgtcatatcttactggtgtttaaatatgtaatgtgtttctttattaacatcactagatgaaaccatatcttaaaatgcagaaatgattggaaggtagatcttatctagcctttggatttcaagaatatcatagtccttttgattttcaaagtttatatgtgaagttcaccatgtatgtggtgaatttcgtaaggtacttggtatacatatctgcctatgtttcttttcaactcataattggaagaattatgatggattatagggtttggttaaaaatccagttactgaaggaattaatgaaaacgtagaagaaagtactaaaaggaatatcataagggctgtagctcaaacttcataatacataaatcactggggtctttttggatttggttgtttgattcgccttccttttttgacatatgtatgccttaattcttaaatctgagggaccatgctttgaaatagactgaaaattaagggtcaccacctaattttactttgtattcagtatcgtaagtgaggttaataaagtcaatactttctaccataaaaaaaaaaaa

SEQ ID NO: 76 - DNA, 592 bp, Homo sapiens
  CDS (65)..(589)
tttcgtctcgctgcacatttgcttctgacacaactgtgttcactagcaacctcaaacagacaccatggtgcacctgactcctgaggagaagtctgccgttactgccctgtggggcaaggtgaacgtggatgaagttggtggtgaggccctgggcaggctgctggtggtctacccttggacccagaggttctttgagtcctttggggatctgtccactcctgatgctgttatgggcaaccctaaggtgaaggctcatggcaagaaagtgctcggtgcctttagtgatggcctggctcacctggacaacctcaagggcacctttgccacactgagtgagctgcactgtgacaagctgcacgtggatcctgagaacttcaggctcctgggcaacgtgctggtctgtgtgcttgcccatcactttggcaaagaattcaccccaccagtgcagccacacctatcagtggtgtggctaatgccctggcccacaactcctgggcaacgtgctggtctgtgtgctggcccatcactttggcaaataattcaccccaccagtgcaggctgcctatcagaaagtggtggctggtgtggctaa

SEQ ID NO: 77 - DNA, 418 bp, Homo sapiens
  CDS (179)..(259)
ggatttatagggcaggtcatgggcaactgacccacatgaaaaaccaattgaattttaaattcctcggccagaggttaaatcaagttatatttcactcataaaatttcttaacttgggcagagatactgtcctttaatcaatcttcaatgctgcttaaataataagtgttaagagatggatggagcctggccaacatggcaaaacaccacctccactaaaaatacaaagattggctgggcattccaggtgcttagggggctgagacataagaattgcttgaacccgggagatggaggttgcagtgaaccgagagtgttccactgcactccagcctgggtgacagaggaagaccctgtctccctgtctaaaaaaagagagatggatgggaataatactaccttcacaccaagccagttga

SEQ ID NO: 78 - DNA, 2295 bp, Homo sapiens
  CDS (986)..(2182)
gcaatttcataatatggtaatttttaatattaaaagtaaattgtaaatgtgtctttataaacaatatgcataaaatagatcatattctaaacccttttctttttaaaacgctttttcacagtaaatttcttatggtcagattttccctcagaatagtgcaactggaagaagggaaatgttggcagtggctcaggactctctgctagtacaagtccttgtagatctcctgcaggagcgggtgaagactcatgtctgtctccgtcttcttgatcacctgcagtagctgcacgtgttccgtgacaatctgtctgaggtctgtcattttctggagcagcttggcaaacagctgtgaggactcagggtggttcagcttcagctggagctccagggcttgtagcaggttgtcttgaatgtcttcaatgggcttcacattcagcaaacctgggcggtctccactgagaataatgacagcaataaatattgccaagtcgctgtcatctaattccagtgcattgaacttcacagcaaactcaaacttgggctccataaagtcaccaaaaggctttcgcaggctctttagaaactcccttgtcatgaagccttggccctcggatatgagaaccccatctttattcatcaaggaggccagcattgtgtaaatgatctcgtggactccatatttgaggagagttacttggtcgttcaagtcaagatttacaaaaccaggaatgcttttggcatactctgtgatctcctgcacagcctccacggagcgaaactggcagccctgaaagatgcggatggccacctctttgctctgctcctgcaggggggtgatgtgtttgaacttgattttatcttctcccatcattaaggaattcatgtcatagataacgaatggtgatttgtctgttgtctttcctgtcaagatcgccctcgcctttgctttggtcagcgggaaggactttatgtatgagtcatacaaatgttttgccagggcctgacggaggtcagcggactctggattcagctggtcgatatcactggagatctccgccaacagcttctccttctcggcctgtgcgatccgcccaaacctgatggcattatgagacatccccactgcaaggcatttctgaaaccgacagtactgacatttatttctactttttttgtggatccgacagttaagatcacatctgtcatagataagcttcaatctgattgttctccggaagaaacccttgcatccttcacaagcatgaactccatagtgaaatccagaagctttatctccacagacacgacattcaattgccatgagggagttggaaggctcttcatgaggcttattgtagagctgagtcttctcagaataataaggtggagatgcaggctccactttgattgcactttggtactcttgaagtttcaggtcatacttgtaatctgcaaccactggatctgttcttgtgaatggaatgtcttcgtaatgtggagtagaaatgctggagaagtcaacagtagtgaagggcttgatatcaaaggagtgggagtggtcttccattacggagagatccacggagctgatcccaaagttggtgggccagaatgcgatctctgtgtcaaccatggtcatttctgcggccacggcggcgtggcgcccctctccggtgtcctcgaggccgacccaagccccccaggcggcggctgcggctcgggctcgggaattccacagactcagagagaacccaccatggtgctgtctcctgccgacaagaccaacgtcaaggccgcctggggtaaggtcggcgcgcacgctggcgagtatggtgcggaggccctggagaggatgttcctgtccttccccaccaccaagacctacttcccgcacttcgacctgagccacggctctgcccaggttaagggccacggcaagaaggtggccgacgcgctgaccaacgccgtggcgcacgtggacgacatgcccaacgcgctgtccgccctgagcgacctgcacgcgcacaagcttcgggtggacccggtcaacttcaagctcctaagccactgcctgctggtgaccctggccgcccacctccccgccgagttcacccctgcggtgcacgcctccctggacaagttcctggcttctgtgagcaccgtgctgacctccaaataccgttaagctggagcctcggtagccgttcctcctgccccttgggcctcccaacgggccctcctcccctccttgcacccgtacccccgtggtctttgaataaagtctgagtgggcggc

SEQ ID NO: 79 - DNA, 1536 bp, Homo sapiens
  CDS (121)..(831)
gttgggtggaaaaagactttcttctctattttcctagttatatatgctatcatatgtctgtgtttctcctcttgaagtttccctgaaacctgggctcttgaagacgcatcactggagcagatggataatggagactggggctatatgatgactgacccagtcacattaaatgtaggtggacacttgtatacaacgtctctcaccacattgacgcgttacccggattccatgcttggagctatgtttgggggggacttccccacagctcgagaccctcaaggcaattactttattgatcgagatggacctcttttccgatatgtcctcaacttcttaagaacttcagaattgaccttaccgttggattttaaggaatttgatctgcttcggaaagaagcagatttttaccagattgagcccttgattcagtgtctcaatgatcctaagcctttgtatcccatggatacttttgaagaagttgtggagctgtctagtactcggaagctttctaagtactccaacccagtggctgtcatcataacgcaactaaccatcaccactaaggtccattccttactagaaggcatctcaaattattttaccaagtggaataagcacatgatggacaccagagactgccaggtttcctttacttttggaccctgtgattatcaccaggaagtttctcttagggtccacctgatggaatacattacaaaacaaggtttcacgatccgcaacacccgggtgcatcacatgagtgagcgggccaatgaaaacacagtggagcacaactggactttctgtaggctagcccggaagacagacgactgatctccgaccctgccacaggttcctggaaagactctccaggaaatggaagatactgatttttttttttaaatcacagggggagatattttttttcttttaaatagttgtatttatttgaaggcagggaggaccaaaaggaagttttgggctttggcaaactcctccatgttttgttcccttccccctgagtatgcatgggcctgttcaaagtctccagataccttttttataaaaagaagcctgaaaatcattatgggatataatctacccttaacagagcttttcttattacagtgctaaaatgatttctgataaaatggtccctaactcaactagaaggctaaaaatacaagaatgaaagaataagcagagtactcatgatgcctttgagaaaaatcaaaacatcatgtagggtgacctagtttccaaaccaataaataagtagtattgtaatattaaaggaaaactgttccaatcatttaaaagtacttattaagtactgctttttacagttatgacaactgtttctttctatgcatataaatcaaggaaccaaatatctgtagccatggaaatgtctgactagaaatatttatattgaattctgaatacaaaatgtccctgtggtagaaaacttactctttatgcctggtgcagtataattcccaagtgtactgtctaccagaaaaaaaaagtcgacgc

SEQ ID NO: 80 - DNA, 535 bp, Homo sapiens
  CDS (64)..(441)
gcgtggctctttattcgtgagttttccatttacctccgctgaacctagagcttcagacgccctatggcgtccgcctcgacccaaccggcggccttgagcgctgagcaagcaaaggtggtcctcgcggaggtgatccaggcgttctccgccccggagaatgcagtgcgcatggacgaggctcgggataacgcctgcaacgacatgggtaagatgctgcaattcgtgctgcccgtggccacgcagatccagcaggaggttatcaaagcctatggcttcagctgcgacggggaaggtgtccttaagtttgctcgcttggtcaagtcctacgaagcccaggatcctgagatcgccagcctgtcaggcaagctgaaggcgctgtttctgccgcccatgaccctgccaccccatgggcctgctgctggtggcagcgtggccgcctcctgagagttggccctcccttgtgccactgccaggggaggaaaggccttgatgttccagacaataataaatgcgcctgtgacttaaaaaaaaaaaa

SEQ ID NO: 81 - DNA, 4885 bp, Homo sapiens
  CDS (106)..(1860)
ccgacgatttcgtcgacgggctgtggctgcggaggatgaggggcgtccgaggcgcggaggggctggctgggcaggaggggttggcggggcagcagggccgcggccatggggagcttgaaggaggagctgctcaaagccatctggcacgccttcaccgcactcgaccaggaccacagcggcaaggtctccaagtcccagctcaaggtcctttcccataacctgtgcacggtgctgaaggttcctcatgacccagttgcccttgaagagcacttcagggatgatgatgagggtccagtgtccaaccagggctacatgccttatttaaacaggttcattttggaaaaggtccaagacaactttgacaagattgaattcaataggatgtgttggaccctctgtgtcaaaaaaaacctcacaaagaatcccctgctcattacagaagaagatgcatttaaaatatgggttattttcaactttttatctgaggacaagtatccattaattattgtgtcagaagagattgaatacctgcttaagaagcttacagaagctatgggaggaggttggcagcaagaacaatttgaacattataaaatcaactttgatgacagtaaaaatggcctttctgcatgggaacttattgagcttattggaaatggacagtttagcaaaggcatggaccggcagactgtgtctatggcaattaatgaagtctttaatgaacttatattagatgtgttaaagcagggttacatgatgaaaaagggccacagacggaaaaactggactgaaagatggtttgtactaaaacccaacataatttcttactatgtgagtgaggatctgaaggataagaaaggagacattctcttggatgaaaattgctgtgtagagtccttgcctgacaaagatggaaagaaatgcctttttctcgtaaaatgttttgataagacttttgaaatcagtgcttcagataagaagaagaaacaggagtggattcaagccattcattctactattcatctgttgaagctgggcagccctccaccacacaaagaagcccgccagcgtcggaaagaactccggaagaagcagctggctgaacaagaggaactggagcgacaaatgaaggaactccaggccgccaacgaaagcaagcagcaggagctggaggccgtgcggaagaaactggaggaagcagcatctcgtgcagcagaagaggaaaagaaacgccttcagactcaagtggaacttcaggccaggttcagcacagagctggaaagagagaagcttatcagacagcagatggaagaacaggttgctcaaaagtcctctgaactggaacagtatttacagcgagtacgggagctggaagacatgtacctaaagctgcaggaggctcttgaagatgagagacaggcccggcaagatgaagagacagtgcggaagcttcaggccaggttgttggaggaagagtcttccaagagggctgaactagaaaagtggcacttggagcagcagcaggccattcagacaaccgaggcggagaagcaggagttggagaatcagcgtgtcctgaaggaacaggccctgcaggaggccatggagcagctggaggagcttgagttagaacggaagcaagcacttgagcagtacgaggaagttaaaaagaagctggagatggcaactaataagaccaagagctggaaggacaaagtggcccatcatgaaggattaattcgactgatagaaccaggttcaaagaaccctcacctgatcactaactggggacctgcagctttcactgaggcagaacttgaagagagagagaagaactggaaagagaaaaagaccacggagtgactgagcttgctggcagtcacgtcagttatgtagatactgcatggcaggagagctttacgctaaagacaaaagaaacagctttgggggccgggcgtggtggctcacgcctgtaatcccagcactttgggaggccgaggcgggtggatcacctgaggtcaggagttcaagaccagcctggccaacctggtgaaaccctgtctctactaaaaatacaaaaaaaattagctgagcgtggtggcgggcgcctgtaatcccagctacttgggaggctgaggcaggagaatcacttgaacgtgggaggcggaggttgcagcgagctgagatcatgccgttgtactccagcttgggcaacagagtgagactccatctcaaaacaaaacaaaacaaaacaaaacaaaaaaacccggctttgctgcttttaactcttcttccttctgtgcctctctaagtgggtcagtatcctaaggaagccttcttatttatcttcctgcaaacaagggttacctgaaaagaaaaaaaaagtcaacattgtcaagctgtttgtttactctttctttgaaaacatcaccttctgaaatttgtcttttagctctctcagattcttccccaaatgaggcagggtgcagacagcacagtcagctctgcagagtttggaggggctcactgccactgggtactcagaacctctgtggactggatgtcagctctttcctttggcagcgtgtttccttttccgagtatgtgctgttaaactagattggccggttcgctttccatttcctgacacttgacatggaatgcctttgaccattggtgctctgacagagaagtcatggagtcattgccatttcctggttgcccttttggaatgtgatcctgttagtagaggttttctagcttctactaagatatttctttccctaaccatcatacacttggcatgtttcattcccatctcctttcccctcaccttaaaggagactacccctttgccccatattgtcaacctaattttctctcgtactctctctagtgaatgatgtgctaccaagtatatgccaggctgtgagaggattatactgagtagtagaaagaagctaatttgaaataaaaattatttgtataattaagaaagcagattagatgcacatggtcaacaggaagttgactgtatgtctgctagttagattcaaaacatcataaagatgatagcatgtcaatatattagcctagccattatgttagcctttgttaggtgggcagcttttctgctttttcccttcctctgtggtgacaacggaggaaatatccaacagaaatacgtctaacagggaaattgggatcatagtttatatgcatctgatttgaaaggagtattgaggaaggttttcatatatgatctatctttggattaaaaagaacatttatgaaatcaagccttctaacactagttataattgagaagcaacagtaactccgtggacagcaatcaagcttaaaattgtaaataaatatggggataattcagttgttgcaaaaaaagggcagaattcagtagaataaagtccttttctcttacaggtattaaatgaggacagagaacctcaggtgttcttatgctagtgcttgctgagtgcatactaagaaagcaattccaaatagatgtatacatctagagagagtggtattagagattcagtgtatgtatttatttacatgagaggaaactggaatataatcccataaattattggaatataatcccataaattatcaccttttatgactggaaaatatttgccaatgaagaaatggtctgtaggtatttgtcttaagatttttggctgtttaataaaaatgtaactttaacggtttcttatagttgcctttataaagtgtattgtctaaaatatttttgtatcatgtgcctttgaaatttgacagctgatttgggtgttggatttctgcccagccatttatcagtattatcattttattcagtagctggcaggtgtattagacaaacgagacttaggtaaggaatggaacctttcctgtggtttgactgcacatcacaccagaagactccagtatccctcattccagaatgaggaaaaagtattctacaaagaacctaatcacctctgtgaaatctatgggatggaaacagtgtggccttaggagtcaaatagtctctgcatggtggggaggatcatgatggaatatgtgaatttctacttctagaagttgtgaaataggtcctgcacttttgcagaatgtccttctttaaacctggcttattccacagctgtagcctgataacatgacctggggccttagctgctctagccctgggttcttggagacctcacactgcctggcccctggccatccacctaaggactgcctgctttctggtcacatgtggaccttgatacgactaagcggttacatatgtggttgtgcaaaagctttctgtttaatgcatagtgttaccgatttacatcttggttttcagtggcactatgtctaggaggcaatatccttttaaacagtgctttggctaagatagatacttgtgaatcaaagatagcacagaaatgaactaagtatatcccatttggaattatattttgatactatttaaaatggtttcacctgttaaagggccaacagaactcttggttttacttttgtaattactgtacagaaaatttcaagagtgtttgagtgcttgtcatcaggtgttttccttaataagtagggatatgatcatttacaggaattatatatgaaaaaagtttttgaaatgtatttttgtgatgtgctatgttgaggggaaaccaaatatttatgattttaaaacattcgtatgaaaacattgtacaatgtaatatgctcaactttctcaattttttgctaatttttctaagatacattaaaaatgttttatatttttttttaagtaaaatggacccagtaagaaaattaaaaataccagaacatacacttaaaaaaaaaa

SEQ ID NO: 82 - DNA, 4936 bp, Homo sapiens
  CDS (238)..(3339)
tttcgtggacactgggcttctgtgtgccagtcgcagccgttggctggcggtcacccaatcccagggcatgccgccggagcctggccaggacgcacggtgaaagacgagtttggtggcaggcttgaccccccggctgccagcagaagccggcgtcgggagcccaggcgggcaggccgctggggtcggggctgcacgtacgagagccgggacgcccgggttcagagcgaaggaggaggcatggcttcggtgttcatgtgtggcgtggaggacctgctgttcagcggcagccgcttcgtatggaacttgaccgtgtccacgctgcggagatggtacacggagaggctgcgggcttgccaccaggtgctgcggacgtggtgcgggctgcaggacgtgtaccagatgacagaaggcaggcactgccaggtgcacctcctggatgataggagactggagctgctggttcagcccaaacttctagcaagagagttgctggacctagtggcttcacatttcaacctgaaagaaaaggagtattttggaataacattcatagatgacacaggtcagcagaactggctgcagttagatcaccgagttcttgaccacgatttgcccaagaaaccaggcccaaccattttgcactttgctgtgaggttttacattgagagcatatcgtttttaaaggataaaaccaccgtggagctgtttttcctgaatgcaaaggcctgtgtgcacaaggggcaaatcgaagtagagagcgaaaccatcttcaagttagcagcgtttattttacaggaagccaagggagattataccagtgatgaaaatgccaggaaagatttaaagacattaccagcctttccaaccaaaactcttcaggagcatccatcccttgcctactgtgaggacagggtaattgagcattatttgaaaatcaaaggtctcactcgaggtcaagctgtggttcagtatatgaaaatagtagaagctctaccgacttacggtgtccattattatgcagtaaaggataagcaaggacttccttggtggcttggaataagctataagggaattggccaatatgatatacaagacaaggtgaagcctcggaagttattccaatggaaacagctggagaacttatatttccgtgagaaaaaatttgctgttgaagttcatgatccacgaaggatttcagtttcaagaagaacctttgggcaaagtggcctgtttgtgcaaacatggtatgctaactcttctctcatcaagtccatttgggtaatggcaattagtcagcatcagttttacttggaccggaagcaaagcaaagcaaaaattccttcagccaggagtttagatgagattgcaatggatttgacagagacaggaacacaaagggcctccaagctggtgacactggaggcgaaaagtcagttcatcatggcaagtaatggcagtttaatctcctcaggttctcaagactcagaagttagtgaagagcaaaagagagaaaaaatccttgaactaaagaagaaggagaaactattacaagaaaaacttctgaaaaaagttgaggagcttaagaagatctgtctgcgggaggctgagctcacaggcaaaatgccaaaggagtatcccctgaacataggcgagaagcctcctcaggtcagaagacgtgtgggtactgcgttcaaattagatgacaacttgctgccgagtgaagaagatcctgctttgcaagaactggagagtaattttctaatacaacaaaagctggtggaagctgcaaagaaacttgccaatgagccagacctttgtaaaactgtgaagaaaaagcgaaagcaagattacacagatgcgatgaaaaagcttcaggagattgaaaatgcaataaacgaataccgaattaggtgtggaaagaaacccagccagaaagcaacagtgttaccagaagacataatcccctcagagagtagctctttgtctgacaccaccacctatgatgatcccagtgatgccttcacttttcctgggcagcgatcaagttcagtacctcattctccaagaattcttccccccaagtctcttggtattgagcgaatccatttcagaaagtcgtccatcaatgaacagtttgtggataccaggcagtccagagaaatgctgtccacacacagcagcccttacaaaactctggagaggcggccccagggaggacgaagcatgcccaccacgccagttcttacccgaaacgcctacagcagcagccacttggaacccgaatcttcatctcagcactgccgccagcggagtggaagcctggagtcccagtcccatctgctctccgagatggacagcgataagccatttttctccctctccaaatcccaaagaagcagcagcacagaaatcctcgatgacgggtcttcttatacaagccaatcaagcacagagtattactgtgtgacaccagttaccggcccctattacaccacccagaccctggacactcgcaccaggggtcggaggaggtcaaagaaacagaatgtttctacttcaaattcaggaagcatgcccaacctagcacaaaaggatagtttgaggaatggtgtttactcaaagagtcaggagccaccgtcttccagttactacattgccgggtacacaccctatgcagagtgtgacttttattacagtggtggttatgtctatgagaatgacaccgagggacagtatagtgtcaacccttcctaccggtcctcagcccactatggatatgagcgccagagggactacagcagatcctttcacgaagatgaggtcgaccgggtaccccataacccatatgcaactctccggctgccaaggaaggctgctgcaaaatcggagcacatcaccaaaaacatccacaaggccttagttgccgagcacttgcgtggctggtaccagcgggcctctgggcagaaggatcagggacacagcccgcagaccagctttgactcagacaggggatcacagagatgcctggggtttgcggggctgcaagtaccttgttctccaagcagtcgtgcatccttgtactcttcagtgtcttctacaaatgcttctgggaactggaggacccagttaaccatagggctgtcggattacgagactccagcacattcttcttacaccagctgctatggcaatgtctataatcctttaccctctccaagcagacaatacacagaaatcagtcaactggatggtacagatggaaaccagctggaagacaacctggagagtagtgagcagagactcttttggcatgaagattcaaagcctggaacattagtctgaactgcagttggacctcctgaccaagcactgcgttctcacactagtgtgccttgcaaattgtatttgtcttccgagaggatgttcgttttagaaacctaaagacatcaaaggttgaagagaagacttagttgccctggaagtgaatcagtgaatcacacaccaagccccacaaagcccctaaaggaggatttggcctttcaaactctaggcactaacgtaactgtagggtctgcccacatgttgaagtattgccaagagaggactcagtgtgaagccttcatcaatagcaagcactttttaagggagtaaaagttgttaaaggcaaacgtcaaaaacatgaaagggcattcaggatgtcccatggcaataagaacaggggaaatctcagagcacaattcagcaggatgagagaaggggaaccagaagctccggagtcattgctcacttcagagtttgaattcgtgagctgacaaagagtaacatgctctttctacacagacatggacaatttagacagtattggaaaattacttgaagctggattttcatgaagttctgaatgagtgtaaatgttttttaggatactataaagagtgatgtttttcataagcaccataaaatgggttctggaaaaactgattaccttagcatcctgtaatataacttatggtagcagattggggaaaatgaagcagcccactgaataattgacaaagtctgcttggagaacattctaaggtacaatatcatggagctcctttttcctttctccactaattgcgtgatgagctattgttctggctggtaattctccaactcggctgtcatttgaagtggcagacttaatatggaaagtttttataattatgagtttgaaaaagcattttaagatgatacagaaagtatccaaaacaacagaaaaaaaaagccacgtcattttagatgaattgcgtgccttaaaatggtgaacgttagaaaattaaacaagtctggattccacaagtagttccaagtcaccaagtgacaaaaacaaggttaacattaaaaaagaaaaacaacaacaacgacaaaaagctccaagctgcagtggatttaattatgaggctaaaactacctcatactttccttggaagaactaattagctatggtttattgtagggttttgtttgtttgttttttaaagcaaatgatttccatattcctgattgatcttttttgtcatctttgcttcaaaattacataaaaggtgctcctttcccccttcttttatacaagtttcttgttcatattgtgaatagaaaagtttctgaacaacttttttggaacattttctatctatattccaaagcatgtaatatatacataaaaacgatttgttaaactggtccttagtcatttgtataattagaaatgaagtttgggaaaaaattttggaaaaaagacaagcaaaaaaaaaataacttattccttttttgcatatttgtatagccttctagaatcagaaataacctttttgcatattcttttattgttctgacttttcaagacctattatttttttacataggtcaataaacaaaaggtgtgctactg

SEQ ID NO: 83 - DNA, 661 bp, Homo sapiens
  CDS (48)..(305)
catgggaaaaaaggtcatcaataggaacttcccctgaataagccctgatgttgaacttagtagacaagtcacctatctatcttatcttatcctatctatctatctatctatctatctatctatctatctatctatctaatctatctatctatctagttttgaaagcgtctcgctctgtggcccaggctggagtacaatggctcgatcctggctcactgcaacctccgcctcccgggttcaagcaattctcctgcctctgcctcccaagtagctgggattacaggtgcacaccaccacgcccggcttagacaagtactttaaatcagcttctacacatatgttcaaataactaaaggaaactgtgtctacagaattaaagtatgagaatgtttcactaaacaaagaatatgagtaaagatacagaaattataggagagagccaaatggaagtttggagtagaaaagtacaataactgaaatgaaaaattcactagagcagcttgacatcaggttttgtttggcaaaagcatctgtgaccttgaagataggtcaactgagatgacccattctgagaagaagaaaaaattccggaataaaggaaagtcaaggaggcctccaaggctgtgcccagctccacatcaacacacgtagctggagtcca

SEQ ID NO: 84 - DNA, 1784 bp, Homo sapiens
  CDS (320)..(739)
gcaaagccagctgggctcctgagtccggtgggtacttggagaacttactacgtctagctggaggattgtaaatgcaccaatcagcatgctgtgtctagctcaagattttctccatccccttattttgggccagtggctgtcattacatatgagatgagtctcttgaagactacagatgaactcaagctccatgaggagatgtttcattgtcgagagcagtcatgatggcctgcactccacacaatgcaacagagtgaaagagcaggttctgcttctttggtgtagtcctgaagcttcctaagaaacttcacatcaggtgatggataggagcaaccctgtaaaaccagccttagactatttttcaaacaggctggtgaattaccatatctccgtcaagtgcagtaaccagttcaagttggaagtgtgtcttttgaaatcagagaacaaagtcgtggacaaccaggctgggacccagggccagctgaaggtgctgggtgccaacctctggtggccgtacctgatgcacgaacaccccgcctacctgtactcctgggaggatggtgattgctcacaccaaagccttggacccctcccagcctgtgacctttgggaccaactccacctacgcagcagacaagggggctctgtatgtggatgtgatccgtgtgaacagctactactcttggtatcgcaactacgggcacctggagttgattcggctgcagctggccgcccagtttgagaattggtgtgagacatcacaatcccattattcagagcgcgtatggagtggaaacgcttgtagggtttcaccagggctggtgaattaccagatctccgtcaagtgcagtaaccagttcaagttggaagtatgtcttttgaatgcagaaaacaaagtcgtggacaaccaggctgggacccagggccagctgaaggtgctggtgccaacctctggtggccgtacctgatgcacgaacaccccgcctacctgtactcgtgggaggatggtgattgctcacaccaaagccttggacccctcccagcctgtgacctttgggaccaactccacctacgcagcagacaagggggctctgtatgtggatgtgatccgtgtgaacagctactactcttggtatcgcaactacgggcacctggagttgattcggctgcaggccctgcagctggccgcccagtttgtgaattggtgtaagacatcacaatcccattattcagagcgcgtatggagtggaaacgcttgtagggtttcaccagtctttcccagggaactccgatgaagtgttccaacaaaatgagcgagtgaaccaagaagaggatgacattagatccaggagatacaacagaggagataatctccaggatgcctgtgaagaaagatccctggatcccaggatgattataggacaagttgttcataatccagcaggccagaagacttccagggaaactcatttcaagatgaaaatggaccagccgcagtggctcacgcctgtaataccagcactttgggaggctgaggcgggcggatcacttgaggtcaagagtttgaaactagcctggccaacgtggcaaaactccatctctattaaagatacaaaaattagccaggcatagtggtgcatgcctgtagtcccagctacttgggatgctgaggcaggaagaattgcttgaacctgggaggcagagtctgcggtgaccgagatcatgccactgcactccagcctgggtgacagagccagactccgtctctactaaaaaaaaaaaaa

SEQ ID NO: 85 - DNA, 2150 bp, Homo sapiens
  CDS (970)..(1110)
gaaccataacctatactacctatcaatactcatcattaataatcataatggctatagcaataaaactaggaatagccccctttcacttctgagtcccagaggttacccaaggcacccctctgacatccggcctgcttcttctcacatgacaaaaactagcccccatctcaatcatataccaaatctctgccctcactatacgtaagccttctcctcactctctcaatcttatccatcataagcaggcagttgaggtggatttaacctaacccagctacgccaaatcttagcatactccgtcaattacccacataggatgaataatagcaggtgtctaccgtacaaccctaacataaccattcttaatttaactatttatattatcctaactactaccgcatgtccgtacgtatttcaacctttaaacgtccagcaccacgaccctactactatctcgcacctgaaacaagctaacatgactaacacccttaattccatccaccctcctctccctaggaggcctgcccccgctaaccggctttttgcccaaatgggccattatcgaagaattcacaaaaaacaatagcctcatcatccccaccatcatagccaccatcaccctccttaacctctacttctacctacgcctaatctactccacctcaatcacactactccccatatctaacaacgtaaaaataaaatgacagtttgaacatacaaaacccaccccattcctccccacactcatcgcccttaccacgctactcccacctatcacaccccatcctaaagtaaggtcagctaaataagctatcgggcccataccccgaaaatgttggttatacccttcccgtactaattaatcccctggcccaacccgtcatctactctaccatctttgcaggcacactcatcacagcgctaagctcgcactgattttttacctgagtaggcctagaaataaacatgctagcttttattccagttctaaccaaaaaaataaaccctcgttccacagaagctgccatcaagtatttcctcacgcaagcaaccgcatccataatccttctaatagctatcctcttcaacaatatactctccggacaatgaaccataaccaatactaccaatcaatactcatcattaataatcataatggctatagcaataaaactaggaatagccccctttcacttctgagtcccagaggttacccaaggcacccctctgacatccggcctgcttcttctcacatgacaaaaactagcccccatctcaatcatataccaaatctctccctcactaaacgtaagccttctcctcactctctcaatcttatccatcatagcaggcagttgaggtggattaaaccaaacccagctacgcaaaatcttagcatactcctcaattacccacataggatgaataatagcagttctaccgtacaaccctaacataaccattcttaatttaactatttatattatcctaactactaccgcattcctactactcaacttaaactccagcaccacgaccctactactatctcgcacctgaaacaagctaacatgactaacacccttaattccatccaccctcctctccctaggaggcctgcccccgctaaccggctttttgcccaaatgggccattatcgaagaattcacaaaaaacaatagcctcatcatccccaccatcatagccaccatcaccctccttaacctctacttctacctacgcctaatctactccacctcaatcacactactccccatatctaacaacgtaaaaataaaatgacagtttgaacatacaaaacccaccccattcctccccacactcatcgcccttaccacgctactcctacctatctccccttttaatcgcaatggcattcctaatgcttaccgaacgaaaaattctaggctatatacaactacgcaaaggccccaacgttgtaggcccctacgggctactacaacccttcgctgacgccataaaactcttcaccaaagagcccctaaaacccgccacatctaccatcaccctctacatcaccgccccgaccttagctctcaccatcgctcttctactatgaacccccctccccatacccaaccccctggtcaacctcaacctaaggc

SEQ ID NO: 86 - DNA, 1184 bp, Homo sapiens
  CDS (461)..(655)
gaagcagccggaaaaaaatgctggtcccacagccaggacatcagccacagtgccggtcctgtgcctcctggccatcatcttcatcctcaccgcagccctttcctatgtgctgtgcaagaggaggagggggcagtcaccgcagtcctctccagatctgccggttcattatatacctgtggcacctgactctaatacctgagccaagaatggaagtttgtgaggagacggactctatgttgcccaggctgttatggaactcctgagtcaagtgatcctcccaccttggcctctgaaggtgcgaggattataggcgtcacctaccacatccagcctacacgtatttgttaatatctaacataggactaaccagccactgccctctcttaggcccctcatttaaaaacggttatactataaaatctgcttttcacactgggtgataataacttggacaaattctatgtgtattttgttttgttttgctttgctttgttttgagacggagtctcgctctgtcatccaggctggagtgcagtggcatgatctcggctcactgcaacccccatctcccaggttcaagcgattctcctgcctcctcctaagtagctgggactacaggtgctcaccaccacacccggctaattttttgtatttttagtagagaccggggtttcaccatgttgaccaggctggtctcgaactcctgacctggtgatctgcccacccaggcctcccaaagtgctgggattaaaggtgtgagccaccatgcctggccctatgtgtgttttttaactactaaaaattatttttgtaatgattgagtcttctttatggaaacaactggcctcagcccttgcgcccttactgtgattcctggcttcattttttgctgatggttccccctcgtcccaaatctctctcccagtacaccagttgttcctcccccacctcagccctctcctgcatcctcctgtacccgcaacgaaggcctgggctttcccaccctccctccttagcaggtgccgtgctgggacaccatacgggttggtttcacctcctcagtcccttgcctaccccagtgagagtctgatcttgtttttattgttattgcttttattattattgcttttattatcattaaaactctagttcttgttttgtctctccgaatgaaaaaaaaaaaa

SEQ ID NO: 87 - DNA, 1255 bp, Homo sapiens
  CDS (69)..(944)
ggcgagctctcagcggaccgagacggtgcagggccggagaagcaccttcactcccagcctgcgccccgatgctgcgcgttctgtgcctcctgcgcccctggaggccccttcgggcccgcggctgcgcttccgacggggcggccgggggctcagagatccaagtgcgcgccctggcgggtccggaccaagggatcactgagattctgatgaacagaccttctgcccgcaatgccttggggaatgtcttcgtcagtgagctgctggaaactctggcccagctgcgggaggaccggcaagtgcgtgtcctgctcttcagaagtggagtgaagggcgtgttctgtgcaggtgcagacctgaaggagcgggaacagatgagtgaagcagaggtgggggtgtttgtccagcgactccggggcctgatgaatgacatcgcagccttccctgcacccaccattgcggctatggatgggtttgccttgggcggaggcctagagcttgccctggcctgtgacctccgagtggcagcttcctcggcagtcatgggactgattgagaccacgcgagggctcctcccgggggcaggagggactcagaggctgccccgttgtctgggggtggccctggcgaaggagctcatcttcacgggccgacgactgagtggaactgaggcccacgtactggggctggtgaatcacgctgtggcccagaacgaggagggggacgccgcctaccagcgggcacgagcactggcccaggagatcctgccccaggcccccattgccgtgcggctgggcaaagtagccattgaccgaggaacggaggtggacattgcatctgggatggccattgaagggatgtgctatgcccagaatattccaacccgggaccggctagagggcatggcagccttcagggagaagcggactcccaaatttgttggcaaatgacccccattttaaccttcagcatgggagatgcatgccctgaagagcaggatccagaaggaagatttgtggccagattgccttcatcatttcacctctccagacttccatttcttcacaaggatgatgatggaaataaaatgactggcgtgatgcctggaaccaaggtgctgatcctaccacctactgctaccttccttagcttcaccctggctagaaataatcacgagggttgggtttgctttggaaaatgcctgtctctctacttgaatgataaagaattaaattagatctctctgaaaaaaaaaaaa

SEQ ID NO: 88 - DNA, 1207 bp, Homo sapiens
  CDS (69)..(896)
ggcgagctctcagcggaccgagacggtgcagggccggagaagcaccttcactcccagcctgcgccccgatgctgcgcgttctgtgcctcctgcgcccctggaggccccttcgggcccgcggctgcgcttccgacggggcggccgggggctcagagatccaagtgcgcgccctggcgggtccggaccaagggatcactgagattctgatgaacagaccttctgcccgcaatgccttggggaatgtcttcgtcagtgagctgctggaaactctggcccagctgcgggaggaccggcaagtgcgtgtcctgctcttcagaagtggagtgaagggcgtgttctgtgcaggtgcagacctgaaggagcgggaacagatgagtgaagcagaggtgggggtgtttgtccagcgactccggggcctgatgaatgacatcgcagccttccctgcacccaccattgcggctatggatgggtttgccttgggcggaggcctagagcttgccctggcctgtgacctccgagtggcagcttcctcggcagtcatgggactgattgagaccacgcgagggctcctcccgggggcaggagggactcagaggctgccccgttgtctgggggtggccctggcgaaggagctcatcttcacgggccgacgactgagtggaactgaggcccacgtactggggctggtgaatcacgctgtggcccagaacgaggagggggacgccgcctaccagcgggcacgagcactggcccaggagatcctgccccaggcccccattgccgtgcggctgggcaaagtagccattgaccgaggaacggagaatattccaacccgggaccggctagagggcatggcagccttcagggagaagcggactcccaaatttgttggcaaatgacccccattttaaccttcagcatgggagatgcatgccctgaagagcaggatccagaaggaagatttgtggccagattgccttcatcatttcacctctccagacttccatttcttcacaaggatgatgatggaaataaaatgactggcgtgatgcctggaaccaaggtgctgatcctaccacctactgctaccttccttagcttcaccctggctagaaataatcacgagggttgggtttgctttggaaaatgcctgtctctctacttgaatgataaagaattaaattagatctctctgaaaaaaaaaaaa

SEQ ID NO: 89 - DNA, 1162 bp, Homo sapiens
  CDS (69)..(851)
ggcgagctctcagcggaccgagacggtgcagggccggagaagcaccttcactcccagcctgcgccccgatgctgcgcgttctgtgcctcctgcgcccctggaggccccttcgggcccgcggctgcgcttccgacggggcggccgggggctcagagatccaagtgcgcgccctggcgggtccggaccaagggatcactgagattctgatgaacagaccttctgcccgcaatgccttggggaatgtcttcgtcagtgagctgctggaaactctggcccagctgcgggaggaccggcaagtgcgtgtcctgctcttcagaagtggagtgaagggcgtgttctgtgcaggtgcagacctgaaggagcgggaacagatgagtgaagcagaggtgggggtgtttgtccagcgactccggggcctgatgaatgacatcgcttcctcggcagtcatgggactgattgagaccacgcgagggctcctcccgggggcaggagggactcagaggctgccccgttgtctgggggtggccctggcgaaggagctcatcttcacgggccgacgactgagtggaactgaggcccacgtactggggctggtgaatcacgctgtggcccagaacgaggagggggacgccgcctaccagcgggcacgagcactggcccaggagatcctgccccaggcccccattgccgtgcggctgggcaaagtagccattgaccgaggaacggaggtggacattgcatctgggatggccattgaagggatgtgctatgcccagaatattccaacccgggaccggctagagggcatggcagccttcagggagaagcggactcccaaatttgttggcaaatgacccccattttaaccttcagcatgggagatgcatgccctgaagagcaggatccagaaggaagatttgtggccagattgccttcatcatttcacctctccagacttccatttcttcacaaggatgatgatggaaataaaatgactggcgtgatgcctggaaccaaggtgctgatcctaccacctactgctaccttccttagcttcaccctggctagaaataatcacgagggttgggtttgctttggaaaatgcctgtctctctacttgaatgataaagaattaaattagatctctctgaaaaaaaaaaaa

SEQ ID NO: 90 - DNA, 3457 bp, Homo sapiens
  CDS (840)..(1391)
ccctagtcagagtggaggaattccaggctcaagacagcgcttccaggttcagtttcagggtctcgccggcagccccagccggcgggcgcggagcgggcagcggggcccggatcgcaggctcctctgggggccccggagttgggaagcggcgtccgggagcccccggaggaggatgggctgcagacacagcaggctgagcagctgcaaacccccgaaaaagaagcgccaagaaccagaaccagaacagccacccagaccagagccccatgaattaggtcccctcaatggggacacagctataactgtccagctctgtgcatcagaggaggctgagcggcaccagaaggatataaccagaattctccagcaacatgaggaggaaaagaagaaatgggcacaacaggtggagaaggaaagggagctagagcttcgagacagactggatgagcagcaaagggtcctggaaggaaagaatgaagaggccctgcaagtcctccgggcctcatatgaacaggagaaagaagcgcttacccactctttccgggaggccagttctacccagcaggagaccatagacagactgacctcacagctggaggctttccaggccaaaatgaagagggtggaggagtccattctgagccgaaactataagaaacatatccaggattatgggagccccagccagttctgggagcaggagctggagagcttacactttgtcatcgagatgaagaatgagcgtattcatgagctggacaggcggctgatcctcatggaaacagtgaaagagaaaaatctgatattggaggaaaaaattacgaccctgcaacaggaaaatgaggacctccatgtccgaagccgcaaccaggtggtcctgtcaaggcagctgtcagaagacctgcttctcacgcgtgaggccctggagaaagaggtgcaactgcggcgacagctccagcaggagaaggaggagctgttgtaccgggtccttggggccaatgcctcgcctgccttccctctggcccctgtcactcccactgaggtctctttcctcgccacatagggtgcagggcctgggcccaccacgacgcctgaagtcacagctccttccaaggtttttctggagaagacagcaggagcctctcagttcttttccaggaaggaacgagggtgggagcgagatggagatcctgggtgtgtgcccagtgagccctggggccttgagttacatggaatcacccacagggttttggaggccccgagaagcgtcttcccttgagttggccaagggaataagcaagaggagacatttcctccctgccccagcactctgtcccaatccgagaagttccgaggctttcccaggggcagtctgtgtcacgctggccatttgacataaaggagacagcccctggtcccagcttgtcagctctgctgccgacttgctgacttatcaacttcctctaggtgtttccactccaccctggcctgctcagagcctcagtttacccctgcattaaaatggtggggggactggtcaaaggactcttatgtcactgcagtgtcccattctaggattgtctgaaggccagagtaggggttggggggagtgtggacaaaccccgcaaatcagagtggggaaggtgagtggtagagagggggtctctgaaggcccttggggctgacagggccaggcagcctccccagctgaggcatcattcctgggccagagtcgtgtccaccaagggacagtagccagagctcctcttcctttaccaggcaaggtgcatcccctcagccctcctggcccttcagtcttggtgccacctgggcacaggggcaagcttggtggttgtgagtccattcatctatcagagctggaacctcatccctgcacagatgaggaaaccaaggcatggagcagttcccagagtcgaatctagatctcatctgtcatccgggtcttatcctttgctctgtttttctcttcaggctctggaaaatcagatctgtgacttaatcttcctctccctggccctcacccacttagtttctttttcattcctgctccctgccttaactcctcctcccactgcccctgatcccaggcccaggcttttacaacctggtgctcagcttccccatcagtgaaaaggggtggctagagtaactaacctcagcaggccgtccagtcctgatagtctgtggatttcggatccttctcaggaagcttcatgtctaatggagactataattataactcctgttctgcatagagcatttgcatcaaaggctttccatacccctccctcccctggtcctcataagatccttgaagcaggttcctattcctcattggcaacatggcaaacagatcacaggagtcaaagggccttgctcaaggtccccagcttcagccccaggccctaagccagcgtcagaacagtcaatctgcatttttcatcagtcattctatagtgacatcatcccagactgccttctgtattcccctgtgtacagtctccttctgtttctaggtttagaagttcagaggtgactgtgtttctccatttccacagccaaatgggggaagaggtgaggctaggggagtgctgtgctgattctccagccatggtcagacaggtcacccaggagcctcgaggaaagccctggagggaatcacatgtgtactttttcatgaagctttttgcaaagcacatctgcgatacactagtttattgaactaatgtccaggagtagacgtgattggtggccaagttatttggggacacctaaacagatcagtgacctgaatgacttctcagaacctttaatatgccaatgtgtgtggcaaacttacaagaagggagctaagtatccagcctctcccaaacctctttgaacaaagcttctgtccctcccacacctctcacctcacaggcacatcaggctgcagaatgcgctttagaaagcattgttttagtccaggcacagtggctcacgcctgtaatcccagcactttgggaggccgaggtgggtggatcacaaggttgggagattgagaccatcctggctaacacagtgaaaccctgtctctactaaaaaaatacaaaaaattagcttggcgtggtggtgggcgcctgtagtcccagcagcttgggaggctgaggctggagaatggtgtgaacccaggaggcggagcttgcagtgagccaagatcgcgccactgcactccagcccgggtgacagagcaagactccgtctcaaaaaaaagaaaagaaaaaagaaagcattgttttaattgagaggggcagggctggagaaggagcaagttgtggggagccaggcttccctcacgcagcctgtggtggatgtgggaaggagatcaacttctcctcactctgggacagacgatgtatggaaactaaaaagaacatgcggcaccttaaaaaaaaaa

SEQ ID NO: 91 - DNA, 1120 bp, Homo sapiens
  CDS (123)..(998)
gggggtactgggaatctgaaaccatctgctctgggaaaggctgcggcgcggctcccactctcggaaccttgtcctgtttgtcccccagctcggcaagcgccatatgagcctggcggcgccagatgcgaatcctgttgtgggctttttggcctattccctcagtcttgccgggatggcaccgcccgcataggacttccagggttgggctgagtgggagttcgactgctgggcctcgtaattctcgctttggggctgctccttccaggctgggacacactggggcccgctgtcggtctcccgtcctccgacatcttgtctggaacttccgcctggcagtctccagtaggagtggagctctgtgcggcgtatttggtggaaaacgggccttgcgtcggctcaccccaagttggttgtgtttcagaatgaagactattctcagcaatcagactgtcgacattccagaaaatgtcgacattactctgaagggacgcacagttatcgtgaagggccccagaggaaccctgcggagggacttcaatcacatcaatgtagaactcagccttcttggaaagaaaaaaaagaggctccgggttgacaaatggtggggtaacagaaaggaactggctaccgttcggactatttgtagtcatgtacagaacatgatcaagggtgttacactgggcttccgttacaagatgaggtctgtgtatgctcacttccccatcaacgttgttatccaggagaatgggtctcttgttgaaatccgaaatttcttgggtgaaaaatacatccgcagggttcggatgagaccaggtgttgcttgttcagtatctcaagcccagaaagatgaattaatccttgaaggaaatgacattgagcttgtttcaaattcagcggctttgattcagcaagccacaacagttaaaaacaaggatatcaggaaatttttggatggtatctatgtctctgaaaaaggaactgttcagcaggctgatgaataagatctaagagttacctggctacagaaagaagatgccagatgacacttaagacctacttgtgatatttaaatgatgcaataaaagacctattgatttggaccttcttcttaaaaaaaaaa

SEQ ID NO: 92 - DNA, 926 bp, Homo sapiens
  CDS (832)..(915)
  misc_feature (1)...(926): n = a,t,c or g
gaccttttcccacggtggggggggggtaccggctccggctcgcggccggggtggtgtgcccccacgcccccctaggtcttttttctgtcctggtggggtccttttttcccccacccaggtgggggctgtntccacaacagcggtttgaggaatgccaagggcaccccccggggatgcttgccccacatgcggcggggaaaccctttgcccccaaaaagaaaatctttctaaggagggattcccctgggatatcatgccctagactggaaagatctaggtcgatccccatgctcccaatcgtccgacctcatagaccccttgagacgtnagtaagtaagtagtagatatatcgttcattaatgcacattagctaacattgaacaattaatccaattttacatatatttaaaatttagcaatactgcattttataacataaaagctcaatcactaaaatgatctacaattctattataaattcacttntaactaaaaaatattttctatcactgtaatacagaggcatattactctgaacatcgacctcatacatcactcaataagttaaccacaaagagcctctccacttagattttcatcaagcatcttacattttaatgtccttacttttttacagaagaggccataatttccacctaatgagtctatatgtgatgcagcaataattgatcacatgctttcacatgtgaataggaacaatgaaacagcatgaagtaatttgatacttgaattatatcataatttgcttttcaaaaattttatatatatacatatttttaaaagcatactttgggctgggtgcagtggctcatggctgcaatcccagcactctgggaggccaaggtgggcagatcacttgagatgaagagtttgagaccaccctggacaaaatggtgaaatcccac

SEQ ID NO: 93 - DNA, 2143 bp, Homo sapiens
  CDS (597)..(902)
ggcttcctttaatagactttaatatagctcatttacaatcgtatgaaaatccatcaagatcaatcatgttgcacaatccctaaaggataaaactgagggaagtcatggataattttcacagcttcattgtaaagtccaagatcaaaaggatggctatcttctttaaactggacataagatgtacacaagatggtggccttggcggttactcttccaaccacttccacaattccagagatttcttcatcaaggggttccatcaactcgatggttccattttttccttctccatctgaaagaataaacatttttccggtgggatgaatctttctgcgatcacaggattcccggcggtgacttgaccccggaagtggggtgtgaagctccggtgctggtgcggcgggggactgcggggccagcctcaggtagcagcagcagcagcagcagcagcagcagcagcagcagcagcagcagcagcagcagctgcttcattgtttcacttcttcagaaagcctccggaatctaaaaagccctcagtaccagagacagaagcagatggattcgtccttttaggagatacaacagatgagcaaagaatgacagcaagaggcaaaacttcggacatagaggccaaccaacctttggagaccaacaaagaaaattcatccagtgtgactgtatcagaccctgagatggaaaataaggcaggccagactctggagaacagctcattaatggccgagctcctgagcgatgtgccgttcaccctggccccgcatgtgctggcagtacagggcaccatcactgaccttcccgaccacttactctcctatgatggcagcgaaaacttatcacggttttggtatgatttcactcttgaaaattcagtgctctgtgattcataacctttatgtctgtttgcaccttaacagctttaaaatatgttcgcctattttatctaacctgtttgatgttctttgccgtttcactgtttaaggtcctcagcaaggatcataaagcaaagaaaatagcattatgttcactactctatttttaagaaaaaggtacatttgtatacaaattgaacttaagttccacttcctttctcccatataataaatatacaaattaggctatgaaggttttaggaaaggactcgattccttcagatggtctctcaaaatataacacctcaaatttatcttagaagaactgtgaaaaagaattgtggcatttttcagtcactacagctccgaagtctgagcaagaagtgggtgtgaagtctcctctctggtttgtaggaagttgaattagtgttattcctgcatttttttcttccacagtgtttatgaatgaattcagaaaaaaagttgccagttagcttaatttcttcagatgcattgatgtggaaatttaaaacttgtcctaaacagcagtgctagtttgctgatacaaggatgctagacctgctctgcgtgctctttctggagtggcccatttcggttttctgaaacccatggcagccctttccatcgtgaataatcgttgtgttcccacctttgttctctgcctttttgctacttcagtgtgctctctgaccagctttccaaagaactttccctgcttctgcctcggttgccatttgctctccttaccacatatgttcccagtttatgaagagatccacatttcctttcaacccctctgcctcctgaagaaaaacatctcatgatgatacatattattgctgataacacccttatttagaaatttgttggccacaatacagatggaaatgttttactgctggaaaaactgaaatcaactcatttccaattagagtataggcagaacacctagatatgacttttagttcttgaatatccattacttactttaatgaaaacagaactgccattggtcaataaactgtaaagggaagaggtaaattgtgatagagaattttctatgtcatgggaaattgaaatcacatttattttgattaccagcaatatgatttgttaactctgtgccaagttttaagtatattttttcacaaagatagagtgccatagtgaaactaaacactgtgcataaaggtacatgaattattccagttttaaagtattatgcatgtttgttt

SEQ ID NO: 94 - DNA, 4382 bp, Homo sapiens
  CDS (362)..(3331)
cccaggccctcctcactctggatgagccggacaagtcccaggggcaggacctccaagaacagctggctgaggggtgtagactggcacagcaccttgtccaaaagctcagcccagggaggtgcagaaggctgaagagagcaaagtccctgaggactcactggaggaatgtgccatcacttgttcaaatagccacggcccttgtgactccaaccagcctcacaagaacatcaaaatcacatttgaggaagacgaagtcaactcaactctggttgtagacagagaatcctctcatgatgaatgtcaggatgctctaaacattctcccagtccctggccccacctcttctgccacaaacgtcagcatggtggtatcagccggccctttgtccggcgagaaggcagcgataaacattctagaaatcaatgagaaattgcgcccccagctggcagagaagaaacagcagttcagaaacctcaaagagagatgttttctaactcaactggccggcttcctggccaaccagcagaacaaatacaaatatgaagagtgcaaagacctcataaaatttatgctgaggaatgagcgacagttcaaggaggagaagcttgcagagcagctcaagcaagctgaggagctcaggcaatataaagtcctggttcacgctcaggaacgagagctgacccagttaagggagaagttgcgggaagggagagatgcctcccgctcattgaatgagcatctccaggccctcctcactccggatgagccggacaagtcccaggggcaggacctccaagaacagctggctgaggggtgtagactggcacagcaccttgtccaaaagctcagcccagaaaatgacaacgatgacgatgaagatgttcaagttgaggtggctgagaaagtgcagaaatcgtctgcccccagggagatgcagaaggctgaagaaaaggaagtccctgaggactcactggaggaatgtgccatcacttgttcaaatagccatggcccttatgactccaaccagccacataagaaaaccaaaatcacatttgaggaagacaaagtcgactcaactctcattggctcatcctctcatgttgaatgggaggatgctgtacacattattccagaaaatgaaagtgatgatgaggaagaggaagaaaaagggccagtgtctcccaggaatctgcaggagtctgaagaggaggaagtcccccaggagtcctgggatgaaggttattcgactctctcaattcctcctgaaatgttggcctcgtaccagtcttacagcagcacatttcactcattagaggaacagcaagtctgcatggctgttgacataggcagacatcggtgggatcaagtgaaaaaggaggaccacgaggcaacaggtcccaggctcagcagagagctgctggatgagaaagggcctgaagtcttgcaggactcactggatagatgttattcaactccttcaggttgtcttgaactgactgactcatgccagccctacagaagtgccttttacgtattggagcaacagcgtgttggcttggctgttaacatggatgaaattgaaaagtaccaagaagtggaagaagaccaagacccatcatgccccaggctcagcagggagctgctggatgagaaagagcctgaagtcttgcaggactcactgggtagatgttattcgactccttcaggttatcttgaactgcctgacttaggccagccctacagcagtgctgtttactcattggaggaacagtaccttggcttggctcttgacgtggacagaattaaaaaggaccaagaagaggaagaagaccaaggcccaccatgccccaggctcagcagggagctgctggaggtagtagagcctgaagtcttgcaggactcactggatagatgttattcaactccttccagttgtcttgaacagcctgactcctgccagccctatggaagttccttttatgcattggaggaaaagcatgttggcttttctcttgacgtgggagaaattgaaaagaaggggaaggggaagaaaagaaggggaagaagatcaaagaaggaaagaagaaggggaagaaaagaaggggaagaagatcaaaacccaccatgccccaggctcagcagggagctgctggatgagaaagggcctgaagtcttgcaggactcactggatagatgttattcaactccttcaggttgtcttgaactgactgactcatgccagccctacagaagtgccttttacatattggagcaacagcgtgttggcttggctgttgacatggatgaaattgaaaagtaccaagaagtggaagaagaccaagacccatcatgccccaggctcagcggggagctgttggatgagaaagagcctgaagtcttgcaggagtcactggatagatgctattcaactccttcaggttgtcttgaactgactgactcatgccagccctacagaagtgccttttacatattggagcaacagcgtgttggcttggctgttgacatggatgaaattgaaaagtaccaagaagtggaagaagaccaagacccatcatgccccaggctcagcagggagctgctggctgagaaagagcctgaagtcttgcaggactcactggatagatgttattcgactccttcaggttatcttgaactgcctgacttaggccagccctacagcagtgctgtttactcattggaggaacagtaccttggcttggctcttgacgtggacagaattaaaaaggaccaagaagaggaagaagaccaaggcccaccatgccccaggctcagcagggagctgctggaggtagtagagcctgaagtcttgcaggactcactggatagatgttattcaactccttccagttgtcttgaacagcctgactcctgccagccctatggaagttccttttatgcattggaggaaaaacatgttggcttttctcttgacgtgggagaaattgaaaagaaggggaaggggaagaaaagaaggggaagaagatcaaagaaggaaagaagaaggggaagaaaagaaggggaagaagatcaaaacccaccatgccccaggctcaacagcatgctgatggaagtggaagagcctgaagtcttgcaggactcactggatatatgttattcgactccgtcaatgtactttgaactacctgactcattccagcactacagaagtgtgttttactcatttgaggaagagcatatcagcttcgccctttacgtggacaataggttttttactttgacggtgacaagtctccacctggtgttccagatgggagtcatattcccacaataaacagcccttactaagccgagagatgtcattcctgcaggcaggacctataggcacgtgaagatttgaatgaaagtacagttccatttggaagcccagacataggatgggtcagtgggcatggctctattcctattctcaaaccatgccagtggcaacctgtgctcagtctgaagacaatggacccacgttaggtgtgacacgttcacataactgtgcagcacatgccgggagtgatcagtcagacattttaatttgaaccacgtatctctgggtagctacaaaattcctcagggatttcattttgcaggcatgtctctgagcttctatacctgctcaaggtcattgtcatctttgtgtttagctcatccaaaggtgttaccctggtttcaatgaacctaacctcattctttgtgtcttcagtgttggcttgttttagctgatccatctgtaacacaggagggatccttggctgaggattgtatttcagaaccaccaactgctcttgacaattgttaacccgctaggctcctttggttagagaagccacagtccttcagcctccaattggtgtcagtacttaggaagaccacagctagatggacaaacagcattgggaggccttagccctgctcctctcaattccatcctgtagagaacaggagtcaggagccgctggcaggagacagcatgtcacccaggactctgccggtgcagaatatgagcaatgccatgttcttgcagaaaacgcttaacctgagtttcataggaggtaatcaccagacaactgcagaatgtagaacactgagcaggacaactgacctgtctccttcacatagtccatatcaccacaaatcacacaacaaaaaggagaagagatattttcggttgaaaaaaagtaaaaagataattagctgcatttctttagttattttgaaccccaaatatttcctcatctttttggtgttgtcattgatggtggcgacatggacttgtttatagaggacaggtcagctctctggctcaatgatctacatttctgaagttgtcc

SEQ ID NO: 95 - DNA, 824 bp, Homo sapiens
  CDS (32)..(445)
  misc_feature (1)...(824): n = a,t,c or g
tggcgcctcggaggcgttcagctgcttcaagatgaagctgaacatctccttcccagccactggctgccagaaactcattgaagtggacgatgaacgcaaacttcgtactttctatgagaagcgtatggccacagaagttgctgctgacgctctgggtgaagaatggaagggttatgtggtccgaatcagtggtgggaacgacaaacaaggtttccccatgaagcagggtgtcttgacccatggccgtgtccgcctgctactgagtaaggggcattcctgttacagaccaaggagaactggagaaagaaagagaaaatcagttcgtggttgcattgtggatgcaaatctgagcgttctcaacttggttattgtaaaaaaaggagagaaggatattcctggactgactgatactacagtgcctcgccgcctggggccccaaaagagctagcagaatccgcaaacttttcaatctctctaaagaagatgatgtccgccagtatgttgtaagaaagcccttaaataaagaaggtaagaaacctaggaccaaagcacccaagattcagcgtcttgttactccacgtgtcctgcagcacaaacggcggcgtattgctctgaagaagcagcgtaccaagaaaaataaagaagaggctgcagaatatgcttaacctttgggccnagagaatgaaggaaggctaaggagaagcgccaggaaccaatttgcgaagagacgcagactttctcctctgcgagctttttacttccaagtctgaattcaagtacagaattaagattttttggagtaacaaataaatatagttccgact

SEQ ID NO: 96 - DNA, 762 bp, Homo sapiens
  CDS (102)..(695)
ctggcggtcccgggtgctgctggttagtgtgctctgagggagggtccgagccagccgctgttttgccggaggagcccctcaggccgtagtaagcattaataatgtctttcatctttgagtggatctacaatggcttcagcagtgtgctccagttcctaggactgtacaagaaatctggaaaacttgtattcttaggtttggataatgcaggcaaaaccactcttcttcacatgctcaaagatgacagattgggccaacatgttccaacactacatccgacatcagaagagctaacaattgctggaatgacctttacaacttttgatcttggtgggcacgagcaagcacgtcgcgtttggaaaaattatctcccagcaattaatgggattgtctttctggtggactgtgcagatcattctcgcctcgtggaatccaaagttgagcttaatgctttaatgactgatgaaacaatatccaatgtgccaatccttatcttgggtaacaaaattgacagaacagatgcaatcagtgaagaaaaactccgtgagatatttgggctttatggacagaccacaggaaaggggaatgtgaccctgaaggagctgaatgctcgccccatggaagtgttcatgtgcagtgtgctcaagaggcaaggttacggcgagggtttccgctggctctcccagtatattgactgatgtttggacggtgaaaataaaagagttttacttctctggactgatcctaaaaaaaaaaaaaaaa

SEQ ID NO: 97 - DNA, 4231 bp, Homo sapiens
  CDS (24)..(3170)
caggacagggaagagcgggcgctatggggagccggacgccagagtcccctctccacgccgtgcagctgcgctggggcccccggcgccgacccccgctcgtgccgctgctgttgctgctcgtgccgccgccacccagggtcgggggcttcaacttagacgcggaggccccagcagtactctcggggcccccgggctccttcttcggattctcagtggagttttaccggccgggaacagacggggtcagtgtgctggtgggagcacccaaggctaataccagccagccaggagtgctgcagggtggtgctgtctacctctgtccttggggtgccagccccacacagtgcacccccattgaatttgacagcaaaggctctcggctcctggagtcctcactgtccagctcagagggagaggagcctgtggagtacaagtccttgcagtggttcggggcaacagttcgagcccatggctcctccatcttggcatgcgctccactgtacagctggcgcacagagaaggagccactgagcgaccccgtgggcacctgctacctctccacagataacttcacccgaattctggagtatgcaccctgccgctcagatttcagctgggcagcaggacagggttactgccaaggaggcttcagtgccgagttcaccaagactggccgtgtggttttaggtggaccaggaagctatttctggcaaggccagatcctgtctgccactcaggagcagattgcagaatcttattaccccgagtacctgatcaacctggttcaggggcagctgcagactcgccaggccagttccatctatgatgacagctacctaggatactctgtggctgttggtgaattcagtggtgatgacacagaagactttgttgctggtgtgcccaaagggaacctcacttacggctatgtcaccatccttaatggctcagacattcgatccctctacaacttctcaggggaacagatggcctcctactttggctatgcagtggccgccacagacgtcaatggggacgggctggatgacttgctggtgggggcacccctgctcatggatcggacccctgacgggcggcctcaggaggtgggcagggtctacgtctacctgcagcacccagccggcatagagcccacgcccacccttaccctcactggccatgatgagtttggccgatttggcagctccttgacccccctgggggacctggaccaggatggctacaatgatgtggccatcggggctccctttggtggggagacccagcagggagtagtgtttgtatttcctgggggcccaggagggctgggctctaagccttcccaggttctgcagcccctgtgggcagccagccacaccccagacttctttggctctgcccttcgaggaggccgagacctggatggcaatggatatcctgatctgattgtggggtcctttggtgtggacaaggctgtggtatacaggggccgccccatcgtgtccgctagtgcctccctcaccatcttccccgccatgttcaacccagaggagcggagctgcagcttagaggggaaccctgtggcctgcatcaaccttagcttctgcctcaatgcttctggaaaacacgttgctgactccattggtttcacagtggaacttcagctggactggcagaagcagaagggaggggtacggcgggcactgttcctggcctccaggcaggcaaccctgacccagaccctgctcatccagaatggggctcgagaggattgcagagagatgaagatctacctcaggaacgagtcagaatttcgagacaaactctcgccgattcacatcgctctcaacttctccttggacccccaagccccagtggacagccacggcctcaggccagccctacattatcagagcaagagccggatagaggacaaggctcagatcttgctggactgtggagaagacaacatctgtgtgcctgacctgcagctggaagtgtttggggagcagaaccatgtgtacctgggtgacaagaatgccctgaacctcactttccatgcccagaatgtgggtgagggtggcgcctatgaggctgagcttcgggtcaccgcccctccagaggctgagtactcaggactcgtcagacacccagggaacttctccagcctgagctgtgactactttgccgtgaaccagagccgcctgctggtgtgtgacctgggcaaccccatgaaggcaggagccagtctgtggggtggccttcggtttacagtccctcatctccgggacactaagaaaaccatccagtttgacttccagatcctcagcaagaatctcaacaactcgcaaagcgacgtggtttcctttcggctctccgtggaggctcaggcccaggtcaccctgaacggtgtctccaagcctgaggcagtgctattcccagtaagcgactggcatccccgagaccagcctcagaaggaggaggacctcgggcctgctgtccaccatgtctatgagctcatcaaccaaggccccagctccattagccagggtgtgctggaactcagctgtccccaggctctggaaggtcagcagctcctatatgtgaccagagttacgggactcaactgcaccaccaatcaccccattaacccaaagggcctggagttggatcccgagggttccctgcaccaccagcaaaaacgggaagctccaagccgcagctctgcttcctcgggacctcagatcctgaaatgcccggaggctgagtgtttcaggctgcgctgtgagctcgggcccctgcaccaacaagagagccaaagtctgcagttgcatttccgagtctgggccaagactttcttgcagcgggagcaccagccatttagcctgcagtgtgaggctgtgtacaaagccctgaagatgccctaccgaatcctgcctcggcagctgccccaaaaagagcgtcaggtggccacagctgtgcaatggaccaaggcagaaggcagctatggcgtcccactgtggatcatcatcctagccatcctgtttggcctcctgctcctaggtctactcatctacatcctctacaagcttggattcttcaaacgctccctcccatatggcaccgccatggaaaaagctcagctcaagcctccagccacctctgatgcctgagtcctcccaatttcagactcccattcctgaagaaccagtccccccaccctcattctactgaaaaggaggggtctgggtacttcttgaaggtgctgacggccagggagaagctcctctccccagcccagagacatacttgaagggccagagccaggggggtgaggagctggggatccctcccccccatgcactgtgaaggacccttgtttacacataccctcttcatggatgggggaactcagatccagggacagaggccccagcctccctgaagcctttgcattttggagagtttcctgaaacaactggaaagataactaggaaatccattcacagttctttgggccagacatgccacaaggacttcactgtccagctccaacctgcaaagatctgtcctcagccttgccagagatccaaaagaagcccccagctaagaacctggaacttggggagttaagacctggcagctctggacagccccaccctggtgggccaacaaagaacactaactatgcatggtgccccaggaccagctcaggacagatgccacacaaggatagatgctggcccagggcccagagcccagctccaaggggaatcagaactcaaatggggccagatccagcctggggtctggagttgatctggaacccagactcagacattggcacctaatccaggcagatccaggactatatttgggcctgctccagacctgatcctggaggcccagttcaccctgatttaggagaagccaggaatttcccaggaccctgaaggggccatgatggcaacagatctggaacctcagcctggccagacacaggccctccctgttccccagagaaaggggagcccactgtcctgggcctgcagaatttgggttctgcctgccagctgcactgatgctgcccctcatctctctgcccaacccttccctcaccttggcaccagacacccaggacttatttaaactctgttgcaagtgcaataaatctgacccagtgcccccactgaccagaactagaaaaaaaaaaaaaaaaaaaaaaaaaagg

SEQ ID NO: 98 - DNA, 1806 bp, Homo sapiens
  CDS (412)..(1110)
cggtccctgggggagtccccagttcctttccctccaggccagctgcacacacttgacactgatttgcacagtcttgcacaaatagggggtaagagcccagtggctggggtgggcaatgggggtatcctctggcctagggagtcccctggcactgccaatgggcacagtcccgagcacacaccccctggccctggacccccaggcccctgccccaccaagcgaaggctgcttcctgctggagaagccccagatgtcagctctgaggaagaggggccagcccctcggaggcgccggggatccctgggccaccctactgctgccaacagttctgatgccaaagccacacccttctggagccacctgctgcctgggcccaaagagcctgttttggacccaacagactgcggtcccatggggcggaggctgaaaggagcccgtcgcctgaagctgagcccccttcgaagcctccggaaggggccaggcctgctgagcccccccagtgcctcccctgttcctacccctgctgtcagccgtaccctgctgggcaactttgaggaatcattgctgcgaggacgttttgcaccatctggccacattgagggcttcacagcagaaattggagctagtgggtcatactgcccccagcacgtcacgctgcctgtcactgtcacattctttgatgtttctgagcaaaatgccccggctcccttcctgggcatcgtggatctgaaccccttggggaggaagggttacagcgtgcccaaggtgggcaccgtccaagtgaccttatttaaccccaaccagactgtggtaaagatgttccttgtgacctttgacttctcggacatgcctgctgcccacatgaccttcctgcgccatcgcctctttttggtgcctgtgggtgaggagggaaatgctaaccccacccaccgcctcctctgctacttgctgcacctcaggttccggagctcccgctcaggccgcttaagcctgcatggagatatccgcctgcttttttcccgccggagcctggagctggacacagggctcccctacgaactgcaggctgtgaccgaggcccctcataatccacgttattcacctttgccctgattgccagcactctgaacccatgcgggctaatgacctgcccatcctgctccatcttagagaacatatatggagagacagcaagagacccttcaggcttgaattaaagccctcaccatgctcacgcccaaatggattatttgggtgtttaaagcttctgattcttactacaccctgccctacttcgggtactccatgtgcctgtcccctcccttgggtttcccaggccagcttaggtagtagggaggaactggagctaccctgagattttctcaagttcccaggcaagttatgccagcgttgcctccctgtcctgggcaggggccacttggtattttatttatttttaatttataatttattcaaattggattgccttggtaacctcccacacctgataattggcatcactcctccccgcttcccactctcagatattgctccaacctcaggagttgaagagggcttatgcggtgggggcaggaggagaactgctttccctcagctgaggggaagaggggctattccagagggactgagtcagtagccaaagactcagcttcccctgtccttccccagtcccttcacttcccctaccctctgacctatctctgaaagccaagttatgcgtatgtgtgtgtgcacaagcttgtctttgtgtggtatgtgtgtgtgagtgtgcatgtatgcacacac

SEQ ID NO: 99 - DNA, 1911 bp, Homo sapiens
  CDS (184)..(1362)
gcacgaagcggggccggggctgcggggcgagttgtcggccctgggccgggagctggagtcccagactcataggtcccggcccagcccccgaagagccgcctcagccggggggagttgctcggactcaaacgtccagtcctcgtgcgaccgcgctgggtcggaagtgagcaggctgaggccaccatggagcagtgtgcgtgcgtggagagagagctggacaaggtcctgcagaagttcctgacctacgggcagcactgtgagcggagcctggaggagctgctgcactacgtgggccagctgcgggctgagctggccagcgcagccctccaggggacccctctctcagccaccctctctctggtgatgtcacagtgctgccggaagatcaaagatacggtgcagaaactggcttcggaccataaggacattcacagcagtgtatcccgagtgggcaaagccattgacaggaacttcgactctgagatctgtggtgttgtgtcagatgcggtgtgggacgcgcgggaacagcagcagcagatcctgcagatggccatcgtggaacacctgtatcagcagggcatgctcagcgtggccgaggagctgtgccaggaatcaacgctgaatgtggacttggatttcaagcagcctttcctagagttgaatcgaatcctggaagccctgcacgaacaagacctgggtcctgcgttggaatgggccgtctcccacaggcagcgcctgctggaactcaacagctccctggagttcaagctgcaccgactgcacttcatccgcctcttggcaggaggccccgcgaagcagctggaggccctcagctatgctcggcacttccagccctttgctcggctgcaccagcgggagatccaggtgatgatgggcagcctggtgtacctgcggctgggcttggagaagtcaccctactgccacctgctggacagcagccactgggcagagatctgtgagacctttacccgggacgcctgttccctgctggggctttctgtggagtccccccttagcgtcagctttgcctctggctgtgtggcgctgcctgtgttgatgaacatcaaggctgtgattgagcagcggcagtgcactggggtctggaatcacaaggacgagttaccgattgagattgaactaggcatgaagtgctggtaccactccgtgttcgcttgccccatcctccgccagcagacgtcagattccaaccctcccatcaagctcatctgtggccatgttatctcccgagatgcactcaataagctcattaatggaggaaagctgaagtgtccctactgtcccatggagcagaacccggcagatgggaaacgcatcatattctgattcctacctggaaggaattttgttgaaaggggttttcacctgtgagccttggtctgtctcggtagggtggtcaacttcagtggactgtggttggtttcagagcgcctggctgaggagttccactgaggggagcactggagcagccctttggcagaggctgaggagggagatggaccagcccacgcctggcacctggctccatggcataaggaaagggagatgctggcctctgtgctcctgctgtcttttcctgtttctgtttgcgtttgacttagtagcaaccgacagagtggcaagggatttggtcttcagcagtagacatccttccacccctgccctcagccaagtctcttgctgccatgccaatgctatgtccacccttgcccctcggcccaagagtgtccagcggtggcccacctcttcctcccactacagcctcaacagtatgtaccatctcccactgtaaatagtcccagttagaacggaatgccgttgttttataactttgaacaaatgtatttactgcccttctcaaaaaaaaaaaaa

SEQ ID NO: 100 - DNA, 1968 bp, Homo sapiens
  CDS (307)..(1665)
atagagttcgatacacaagcggaggaattcctggagcgttcggcggacagtgagcatgcgtaccatatctgaagttcgtaaattgaaattgaacatgcgtaattaatctttctgaataggaaaaaatatatacacaacaaaactctccgtttatggaacatgcgcatttgttctcagtaagtttttcgttttgaaagtgagcatgcgcatggtgagtaggttggtccgaagtttgaaccggacagaagcgctggtcggcgtctggcggttgtttttagaggtaatacacctagtttgtggctcagcatgtcaattgtaacagtgcaacttggtcagtgtggcaatcagattggttttgaagtttttgatgctttgcttagtgactcacacagttcccagggactctgctctatgagagagaatgaggcatatcaagcatcttgcaaagaaagattcttcagtgaggaggagaatggagttccaattgcccgggctgttcttgttgacatggaacccaaagttatcaatcaaacgctgtcaaaggctgcccagtctggccaatggaaatatggtcaacatgcatgcttctgtcaaaaacaaggttctggaaacaactgggcatatggttactctgttcatggacccaggcatgaagaatctataatgaacataatccggaaggaagtggagaaatgtgactctttcagtggttttttcatcataatgagtatggctgggggcacaggatcaggattaggagctttcgttacacagaatttagaagatcagtactcaaactcattgaaaatgaatcagattatttggccttatggaactggtgaggttattgttcaaaactacaactccattttgacactttctcacttgtaccgatcttcagacgccctccttcttcatgagaatgatgccatccataagatctgtgcaaaactgatgaatatcaagcagatctcctttagtgatatcaatcaagtcctcgcacatcagctgggaagtgtgttccagcctacttattctgcagaaagctcatttcactacagacgaaatccactaggagacttaatggagcatttagttccccatcctgaattcaagatgctgagtgttcgtaacattcctcacatgtctgagaattcattggcatacaccacatttacttgggctggcctcctcaagcatttgagacagatgctcatttctaatgcaaagatggaagaaggtattgataggcatgtatggcctcctttatcaggacttcctcctcttagtaaaatgtctctcaacaaggacctgcattttaacacttccattgctaacttggtcattcttcgtgggaaagatgtgcaaagtgcagatgtggagggatttaaagatccagctctgtatacttcctggttgaagcctgttaatgctttcaacgtgtggaaaacccagcgggcctttagcaaatatgagaagtctgcagtgttggtcagcaacagccagttcttagtaaaaccacttgatatgattgttgggaaggcatggaatatgtttgcttcaaaagcctacattcatcagtacacaaaatttggaatcgaagaagaggactttttagacagtttcacgtcattagagcaggttgttgccagttactgtaatctctgatcttgaacaatgggaaaagtataccttaaggcatttctggactaaaatattttcaatactattttctctgtaaagttttcaaagttctccatcctggctaacacggtgaaacaccgtctctaccagaaaatacaaaaaattagccaggcgcggtggcgggtgcctgtagtcccagctactcgggaggctgaggcaggagaatgacgtgaacccaggaggcggagcttgcagtgagccgagatcgcgccactgcactccagcctgggcgacagagcgagactccgtctcaaaaaaaaaaaa

SEQ ID NO: 101 - DNA, 1662 bp, Homo sapiens
  CDS (307)..(1359)
atagagttcgatacacaagcggaggaattcctggagcgttcggcggacagtgagcatgcgtaccatatctgaagttcgtaaattgaaattgaacatgcgtaattaatctttctgaataggaaaaaatatatacacaacaaaactctccgtttatggaacatgcgcatttgttctcagtaagtttttcgttttgaaagtgagcatgcgcatggtgagtaggttggtccgaagtttgaaccggacagaagcgctggtcggcgtctggcggttgtttttagaggtaatacacctagtttgtggctcagcatgtcaattgtaacagtgcaacttggtcagtgtggcaatcagattggttttgaagtttttgatgctttgcttagtgactcacacagttcccagggactctgctctatgagagagaatgaggcatatcaagcatcttgcaaagaaagattcttcagtgaggaggagaatggagttccaattgcccgggctgttcttgttgacatggaacccaaagttatcaatcaaacgctgtcaaaggctgcccagtctggccaatggaaatatggtcaacatgcatgcttctgtcaaaaacaaggttctggaaacaactgggcatatggttactctgttcatggacccaggcatgaagaatctataatgaacataatccggaaggaagtggagaaatgtgactctttcagtggttttttcatcataatgagtatggctgggggcacaggatcaggattaggagctttcgttacacagaatttagaagatcagtactcaaactcattgaaaatgaatcagattatttggccttatggaactggtgaggttattgttcaaaactacaactccattttgacactttctcacttgtaccgatcttcagacgccctccttcttcatgagaatgatgccatccataagatctgtgcaaaactgatgaatatcaagcagatctcctttagtgatatcaatcaagtcctcgcacatcagctgggaagtgtgttccagcctacttattctgcagaaagctcatttcactacagacgaaatccactagagggatttaaagatccagctctgtatacttcctggttgaagcctgttaatgctttcaacgtgtggaaaacccagcgggcctttagcaaatatgagaagtctgcagtgttggtcagcaacagccagttcttagtaaaaccacttgatatgattgttgggaaggcatggaatatgtttgcttcaaaagcctacattcatcagtacacaaaatttggaatcgaagaagaggactttttagacagtttcacgtcattagagcaggttgttgccagttactgtaatctctgatcttgaacaatgggaaaagtataccttaaggcatttctggactaaaatattttcaatactattttctctgtaaagttttcaaagttctccatcctggctaacacggtgaaacaccgtctctaccagaaaatacaaaaaattagccaggcgcggtggcgggtgcctgtagtcccagctactcgggaggctgaggcaggagaatgacgtgaacccaggaggcggagcttgcagtgagccgagatcgcgccactgcactccagcctgggcgacagagcgagactccgtctcaaaaaaaaaaaa

SEQ ID NO: 102 - DNA, 3177 bp, Homo sapiens
  CDS (916)..(1899)
acgcgtccgggggaaatctccttcagtggaagctgctgagtgtcgttggcggaaagtatcctggagcccagcaaaagcctccaaagcactagagcttccctaaagaaaagcagaataaaagaaagacaagaagggaagcccgttcctctaaagcccgggtttccaatagtcccggatcctcctggagttgggcgaaggcgcagttggcagcagccgctgctggcacccggacttggaaaggcggtgttcccccttttcgggaggagggaggcagggacttgcaggcaagagttgcacctggtctaggaacctgcagagaaaagaactctggggagaagaactgccccggagcgcagcagccaccctccgaccatgccccggtgaggggggcggacttcgagggcaacttgccgcggactgcctgggcttagccagcgagctacgcgctcccgggagcccggaattgcacggcgcagcccggcggggggctatcgtctatgtcttcttggggcgccagacgaatcggggtctcgtttttgctggaagagcccagtgttggtggcttcaggtggctgctgccgccgccgccgccgccgccgctgctagtgcggtttccgccgctggtgcgaagagaagagacacgcgagcggggagacctccaaggcagcgaggcatcggacatgtgtcagcacatctggggcgcacatccgtcgagcccgaggggagatttgccggaacaattcaaactgcgatattgatcttgggggtgactgtccctggccggctgtcgggtgggagtgcgagtgtgcactcgctcggaagtgtgtgcgagtgtgtatgtgtgtgtgccgtgtcgggctccccccttccccccgttttcccgtcgagtgatgcacttggaatgagaatcagaggatggaaatagtctgggaggtgctttttcttcttcaagccaatttcatcgtctgcatatcagctcaacagaattcaccaaaaatccatgaaggctggtgggcatacaaggaggtggtccagggaagctttgttccagttccttctttctggggattggtgaactcagcttggaatctttgctctgtggggaaacggcagtcgccagtcaacatagagaccagtcacatgatcttcgacccctttctgacacctcttcgcatcaacacggggggcaggaaggtcagtgggaccatgtacaacactggaagacacgtatcccttcgcctggacaaggagcacttggtcaacatatctggagggcccatgacatacagccaccggctggaggagatccgactacactttgggagtgaggacagccaagggtcggagcacctcctcaatggacaggccttctctggggaggtgcagctcatccactataaccatgagctatatacgaatgtcacagaagctgcaaagagtccaaatggattggtggtagtttctatatttataaaagtttctgattcatcaaacccatttcttaatcgaatgctcaacagagatactatcacaagaataacatataaaaatgatgcatatttactacaggggcttaatatagaggaactatatccagagacctctagtttcatcacttacgatgggtcgatgactatcccaccctgctatgagacagcaagttggatcataatgaacaaacctgtctatataaccaggatgcagatgcattccttgcgcctgctcagccagaaccagccatctcagatctttctgagcatgagtgacaacttcaggcctgtccagccactcaacaaccgctgcatccgcaccaatatcaacttcagtttacaggggaaggactgtccaaacaaccgagcccagaagcttcagtatagagtaaatgaatggctcctcaagtagggaacaaagccaagaagaatcccacctcagtgaaatgctacaactgtgaattgacgtaacctagaatgtcccccttcttgcttctctctccttctttcccccaagcctcattcattcttgggattggccctttcttcatgaaaagtgtctgcaaaaccatggcagaggaatacatctctcacacatactcacaaacacacacacaagcacttgcacatacatacaaacacatgcaaacatacctacacacacacacactcttacaacctccatcatgggaagtcaagtttcagaaacaaaagtctcattcataagaggtcttagaagaaaataaccagttaacctgatttcaattttgataccgttttcctgaactaataaatctacccaatgagacttttcagcctttgtacatacaaaattcttccaaaagagagaggagaaaatacagctctgatggcatcaaacggactttgcatcaagtaatttcagatagtgtcctaggatcctttgagggtgctggtagcaggtgagcaggacaaagttgaccaaggacacttatttctagattatgattcttctgtttactcaacaatttacaaagaaaaaaaggacagacattgaagagctacacattgtatatatatcaccacagactataaggaaatggaattatttccctctttgtcacatatctgtagtaggatttgccaagatcagaaatgatccatttgctgtttcttgttttccaaaggtcatacattgtgtttggttattgttaccagctcaataaatgtgtttaacgagttaatttcatttttctggctttggtctgttctccttccttacaggctaagccctggctccatgcaactgcattctttgatttcacttgttccttcatctacatgttttgttcatttgcagccagtttttactgagtttgtggcaatcaggaatgcatttgctaagcaagtatgactttaattccactccatggctcaatcattcacatgaggtgagcttcagcctgagatagcaggcgacagacttcttgcgtttcaaaactgccatgcccccctgtgatgctcccgtgaaggaatgcactttgccttgtaagttcctgggaaaggggtatgttttctctccaggtgcagccagatctcacaaagtacaaaacgaatgcctttcttttcttgtttataatggtcactcactgtgtttggttactgtcaagaaatcaataaatgtgtttaacaagttaaaaaaaaaaaa

SEQ ID NO: 103 - DNA, 704 bp, Homo sapiens
  CDS (257)..(523)
tgtcttgttatttctttttttggggggtttcttctgtttcttttttctgcctatttttggattaactgaatattttttagtgttatgttttattaattggcttttggttatatctgcgctatgtttttgctgtaggaattacaaaatatatacctaacctacctacttagagttagcattttacctctaaataaaatgtaaaagtattgcaaacatataggtttctttattctagcccccccttataattgaatatatgtggggggggatgtgtgtatatatctatatacactttcaatggatggagatatgtatctatactttcagtgtatattatatctacatgcatacattgtgtatgtatgtagatgtatatctacatacattgaaagatatatatctacatactatacaatgcatgtatgatacctttggctactacatccttcttaaatttcctgttgccacttatgacctgatttccttgaccagttattcctccttcaaacatccctcttacatgtgatagtcctcagcatttagtttccccaactttcccctaattatcagttgactcaattaccaccaaaatatcaatgacttttttgagacagagtctcactctgtcaccaggctggagtgcagtggcacgatcttggctcagtgcaacctctgcctcctgagtccaagtgattctcctccct

SEQ ID NO: 104 - DNA, 1069 bp, Homo sapiens
  CDS (67)..(717)
cgcgtccgcccacgcgtccgcgcacgcttggtgcgtgcgcggcgactgcgacgggcagtggcagtcatggcggctcagtgcgtgaggttggcgcggcgcagtcttcctgctttggcgttgtctctcaggccatctccccggttgttgtgcacagccacgaaacaaaagaacagtggccagaacctggaagaggacatgggtcagagtgaacagaaggcagatcctcctgctacagagaagaccctcctggaagagaaggtcaagttggaggaacagctgaaggagactgtggaaaaatataaacgagctttggcagacactgagaacttacggcagaggagccagaaattggtggaggaggcaaaattatacggcattcaagccttctgcaaggacttgttggaggtggcagacgttctggagaaggcaacacagtgtgttccaaaagaagaaattaaagacgataaccctcacctgaagaacctctatgaggggctggtcatgactgaagtccagatccagaaggtgttcacaaagcatggcttgctcaagttgaaccctgtcggagccaagttcgacccttatgaacatgaggccttgttccacacaccggttgaggggaaggagccaggcacagtggccctagttagcaaagtggggtacaagctgcatgggcgcactctgagacccgccctggtgggggtggtgaaggaagcttagctgctgttgatggggtgggtgtttttaaactcacttgatgtaactctcaaggctggttcattgtttctcatctatgagtacgtgtgaccttttcccaaaccttattggaaaccttaagtaaccagtggctaaacagaaaagccggttgcccaactgcattaatgaactctaattcgggagtctgttcccttttagtgccacgcgttgaatagttccacatactttcagaagagctcagcagggccctgcctggtctcccgagcatcatgagtaacgtgtctgctcagactctgctgacaccaaagtattttaaacaaataaaaggtcttggggaaaaaaaaaaaaaaaa

SEQ ID NO: 105 - DNA, 2322 bp, Homo sapiens
  CDS (752)..(931)
gaattccctcttcgacccacgcgtccggcaaggtcaagtctggatgattactgtccttctgaccaagttgattctattcatgaaaaggtcctcaatatgctacgtgccctctatggaaatctagacctccaagtgtatgcagcagagtctcctccatcttgaaacaaacaaaacattaggctcctgttgtatcttggtttagtaacaggcccttaattaacttatttgtacatgagtcttccagagaacactgttttatattaactttcagttgaaatctttcagatattttgaatctctgaacaaccattgtcagttgtgaatgatggtaaattttttggcatcaagtctcataaccccaactgatagaactgttgcttatctgtcttccttaagtattttttagggttttgtttttttttttgtttgtttgtttgtttgtcttcacttttcccccagggtctgttgagctgtatgagattcattcatacttcatttattcattcaactaatatttgttgaacacttacatgtaccagacattattaagtgctgggtatatggtaatgaacagaatagacaaggcccctgcccttttaggggagacagatgagaagtaaattccgggttatgagaaatgttatgaaggaaaggacaacaacagacatgtcttagtacttagggtatcatggctttataggaaagtaacattctctatcttttttttttttttaattttataaaaatagagatggggtctcaccatgttacccaggctggtctcaaactcctgggcacaagcaatccacctgccttcgcctcccgaagtgctgggattacagatgtaagtcactaccccagccagaaactaacattctcaaaagctactaccaaaaaaaccccacaaatttgccaatccatgaaagtatcataggaagtctacctttccaaggaatttggcattgtggccctgctcttgccaaatgctctccagcattgttggtatcaaggtggtctggttgagtaaacttgaccaaacaaaaattaactgttttttgcttttctgtttttgttttgctgatcaaaaaagcccttcagggtcttttgtgcatccaggaggtcattgtagatatcaataatatagtgcctaagtgccactttattgccaagtctagattgatacttttttcagataaaccagctttttatgtaaagagtaagggaaaaagttaaatctttaattctgacctgccataaatacccaaagatataaactgtcttccaccacccccctcataactaagacatccttcctgagtcactcttaatcatgaaacttgattttctcaattggccagtcttctgatctttagtatctctttagttcagtaatttttacctacctacttgatttattttcctttaaaaggtgaaatgacatttaaagaaaaacaaacacccatcattcctcagtcccaacacagcagttcttttcactcttgcttgtaactttcaggccttacccacatgtgttcctatagagttgcatgtagctaaaattatagtgtgctgcctaactttgtgctaataacgaaggacacacattatcattgcctcacagtggatggcacctgaccccatttttccaaggattctattttccagtgaatttttgtcaccgagttaatttcccaagtctgatagcatgaatgcttatttgtgctgtgaaaagcagagcagcctgagtcagctttccattttcataggataatatgtgccaaaaaaggtttattttcttggtaaaatcagaattgtagaattgtgctatttttaatttttaaaatttttggttagagcttatagacattacttttatgattattttgcgtgctaaataagttaaagggtatgttttgaactatagcactaattaatgtgtgtgatcctagtatgttgatagctttgattttgtgagtggtttactagtcatttattatgattcccatgaactctgatatgattcattgtggttttaactcaggttgaataaaagcatccatttcttttataggaaggtttgtttaattctcatgttctgtgatcatctctttgagaataaaattcagtccctaatagttgaaaagaatcaacttagtaaattatgtcttgcacattccaaataggaaggtatttactttatcaagatgtgtttcatttgtgttctgagtaccagtgaggggataccgtggtacagtgttttgaattgtgtactaatatcattaaagcatgggattttagtggctttttaaaaaatgtgaaaaa

SEQ ID NO: 106 - DNA, 1576 bp, Homo sapiens
  CDS (23)..(1573)
ggaagctgccccgtccaggttcatgttcctcttatttctcctcacgtgtgagctggctgcagaagttgctgcagaagttgagaaatcctcagatggtcctggtgctgcccaggaacccacgtggctcacagatgtcccagctgccatggaattcattgctgccactgaggtggctgtcataggcttcttccaggatttagaaataccagcagtgcccatactccatagcatggtgcaaaaattcccaggcgtgtcatttgggatcagcactgattctgaggttctgacacactacaacatcactgggaacaccatctgcctctttcgcctggtagacaatgaacaactgaatttagaggacgaagacattgaaagcattgatgccaccaaattgagccgtttcattgagatcaacagcctccacatggtgacagagtacaaccctgtgggtgggaaggaaggatctacacagttgcatgaaaacgagatgactgtgattgggttattcaacagcgtaattcagattcatctcctcctgataatgaacaaggcctccccagagtatgaagagaacatgcacagataccagaaggcagccaagctcttccaggggaagattctctttattctggtggacagtggtatgaaagaaaatgggaaggtgatatcatttttcaaactaaaggagtctcaactgccagctttggcaatttaccagactctagatgacgagtgggatacactgcccacagcagaagtttccgtagagcatgtgcaaaacttttgtgatggattcctaagtggaaaattgttgaaaccttacatggcgagacctagagaattggaaaaggagaaagttaaacacgaacaccttttgagtgttgaacttttggaaaaaagcccttggaatccgggactccaacatgcaatgattgccccagatctctgtactacacctgaccactttctgaaatatttgaagccgaggatacaggaagttcttaaagccagtctggctctggggatgatcgcagaaaccctaagagaattatctgagctggtcactagcacctttcttgatgctttggaaacagagatgctcctgagtgcccataagaatggtcagcccagagcctctctccctactgctgctacacaagaccctgagactgacctgcaggacgaaaccatgaagagcctgatccttcttgccatcctggccgccttagcggtagtaactttgtgttatggagagtggcagaaagaagaaaacttcggctttgatatcgtttcagttctctctctgaactggcatcgtgcccaggaatcacatgaaagcatggaatcttatgaacttaatcccttcattaacaggagaaatgcaaataccttcatatcccctcagcagagatggagagctaaagtccaagagaggatccgagaacgctctaagcctgtccacgagctcaatagggaagcctgtgatgactacagactttgcgaacgctacgccatggtttatggatacaatgctgcctataatcgctacttcaggaagcgccgagggaccaaatga

SEQ ID NO: 107 - DNA, 642 bp, Homo sapiens
  CDS (46)..(237)
caatcttagtttgcctccagttaatcttttatgcttagggattaaatgtgtggttttttttttgttttttttttttggagacggagtctcgctctgtcacccaggctggagtgcagtggcgcgatctcggctcactgcaacctctgcctcctgggttcaaacgattctcctgcctcagcctcccaagtagctgggattataggcgcccaccaccatgcctggctgattttttatttttagtagagatggggtttcaccgtgttggccaggctggtctcgaactcctgacctcgtgatctacccacctcggcctccccaagtgctgggattacaggcgtgagctagcatgcctggccagggattaaaatattcaaacatgttgtgtgtacccagatatgctgttaatttaggaaaaacagtacaatttctatgaagtggttgtgactattttctgtagtcaatacagttgggatatctgatctatttctctgtctactttggaaatgattgcataataaataaaattttactgtttttttaaaaaaaaaacagaggtgatacaagcagagggggttccagtggaattgctaggctgacgggcgaggtgcgtgttcaggggtttaagtatgcctctggagggtt

SEQ ID NO: 108 - DNA, 2341 bp, Homo sapiens
  CDS (228)..(2024)
cacgcgtccggcaaggccctgtgagcgggaggactgggatcccggccgcggctgctggaagcgtcgaagctcagcggggccgcggacactgacctgtgcttagaactcatcctggcccgcagagcctgccgcgagtccctggcgtcccctgtggcgggctcttggagccactttcccgagcggaagtcagcccgcggctcggactccggcgggacctgctcggaggaatggcgccgccgggttcaagcactgtcttcctgttggccctgacaatcatagccagcacctgggctctgacgcccactcactacctcaccaagcatgacgtggagagactaaaagcctcgctggatcgccctttcacaaatttggaatctgccttctactccatcgtgggactcagcagccttggtgctcaggtgccagatgcaaagaaagcatgtacctacatcagatctaaccttgatcccagcaatgtggattccctcttctacgctgcccaggccagccaggccctctcaggatgtgagatctctatttcaaatgagaccaaagatctgcttctggcagctgtcagtgaggactcatctgttacccagatctaccatgcagttgcagctctaagtggctttggccttcccttggcatcccaagaagcactcagtgcccttactgctcgtctcagcaaggaggagactgtgctggcaacagtccaggctctgcagacagcatcccacctgtcccagcaggctgacctgaggagcatcgtggaggagattgaggaccttgttgctcgcctggatgaactcgggggcgtgtatctccagtttgaagaaggactggaaacaacagcgttatttgtggctgccacctacaagctcatggatcatgtggggactgagccatccattaaggaggatcaggtcatccagctgatgaacgcgatcttcagcaagaagaactttgagtccctctccgaagccttcagcgtggcctctgcagctgctgtgctctcgcataatcgctaccacgtgccagttgtggttgtgcctgagggctctgcttccgacactcatgaacaggctatcttgcggttgcaagtcaccaatgttctgtctcagcctctgactcaggccactgttaaactagaacatgctaaatctgttgcttccagagccactgtcctccagaagacatccttcacccctgtaggggatgtttttgaactaaatttcatgaacgtcaaattttccagtggttattatgacttccttgtcgaagttgaaggtgacaaccggtatattgcaaataccgtagagctcagagtcaagatctccactgaagttggcatcacaaatgttgatctttccaccgtggataaggatcagagcattgcacccaaaactacccgggtgacatacccagccaaagccaagggcacattcatcgcagacagccaccagaacttcgccttgttcttccagctggtagatgtgaacactggtgctgaactcactcctcaccagacatttgtccgactccataaccagaagactggccaggaagtggtgtttgttgccgagccagacaacaagaacgtgtacaagtttgaactggatacctctgaaagaaagattgaatttgactctgcctctggcacctacactctctacttaatcattggagatgccactttgaagaacccaatcctctggaatgtggctgatgtggtcatcaagttccctgaggaagaagctccctcgactgtcttgtcccagaaccttttcactccaaaacaggaaattcagtggatccggattggtgccaatgtctccaacttcacttttgctcctagcacgattatatttcacctgggacatgctgctatgctgggactcatgtatgtctactggactcagctcaacatgttccagaccttgaagtacctggccatcttgggcagtgtgacgtttctggctggcaatcggatgctggcccagcaggcagtcaagagaacagcacattagttccagaagaaagatggaaattctgaaaactgaatgtcaagaaaaggagtcaagaacaattcacagtatgagaagaaaaatggaaaaaaaaaactttatttaaaaaagaaaaaagtccagattgtagttatacttttgcttgtttttcagtttccccaacacacagcagatacctggtgagctcagatagtctctttctctgacactgtgtaagaagctgtgaatattcctaacttacccagatgttgcttttgaaaagttgaaatgtgtaattgttttggaataaagagggtaacaataggaaaaaaaaaaaa

SEQ ID NO: 109 - DNA, 910 bp, Homo sapiens
  CDS (352)..(771)
gccccatgggacagggtctccactcctgagactcatgggattagactaggcctacctggatgatctgggatcctctcccatgtccaggtctctatccctaaccacatcagcaaagtctcttttgccatggaaggtatttgcaggctctgactttgtgtgtattagggcaggacatttttggcggggcagtggtgggggcagggaattattctgcctaccatgccttatacaaaaataaataaatcacaggcttatacctgaaagaattcctgcaaataataaaagaattagagcagctcagttaaataaaaaaaggtatgagatgtgaacagacacttcacagaagatgacatgcaggggagcaaggtatttatcaaaaagtgctccacttttcacttaccagagaaatgcaaatcagcacccaaaggagtcactgcggcaccctcatctgagcctcagaagttagaaagatggatagcaccagtgtcaaaggtgactgtgggagggagatttgcatacactgctagtaacaatgcgaaattgatggaaccaacctggaaaatggcttggcatcaactgttggagaagaagacacacagtcctctaacctgccagtcccacatcagggcctggatatggccgtcatgtgtaccagggagcatggccaggaatctttacagccaaatactcaccatagcaccaaactggaatcagccgacatacccatcaggaagagaatggatgttaaaaaatgcaaggatagccattgggtagaacgccatacagccatgacaattacacagtgacacctacacacaaggagcatgagtctcacaaacatggcagcaaaaggagcctgttcaagagggtatgtgctatggattccattgtagataaagtttttcaaaag

SEQ ID NO: 110 - DNA, 1755 bp, Homo sapiens
  CDS (338)..(1303)
aaacaagaaaacaaaaaacacaacatgaaagaagagacaacaagaagaccaacaagaagaatagaagagacaaaagaaagagagagagaaggagaagagagaagacacagacaatgtcgggtcctgagggaaagtacccacgaccaagctaatgatgttgttgacgttgatggaaagtgcatcaagaacgcaattacgtactttagtcatgttacgccgatcatgttaatttgcagcatgcatcaggcaggtgctcttacagcctgttccaagtgtggcttaatccgtctccaccaccagatctttctccgtggattcctctgctaagaccgctgccatgccagtgacggtaacccgcaccaccatcacaaccaccacgacgtcatcttcgggcctggggtcccccatgatcgtggggtcccctcgggccctgacacagcccctgggtctccttcgcctgctgcagctggtgtctacctgcgtggccttctcgctggtggctagcgtgggcgcctggacggggtccatgggcaactggtccatgttcacctggtgcttctgcttctccgtgaccctgatcatcctcatcgtggagctgtgcgggctccaggcccgcttccccctgtcttggcgcaacttccccatcaccttcgcctgctatgcggccctcttctgcctctcggcctccatcatctaccccaccacctatgtccagttcctgtcccacggccgttcgcgggaccacgccatcgccgccaccttcttctcctgcatcgcgtgtgtggcttacgccaccgaagtggcctggacccgggcccggcccggcgagatcactggctatatggccaccgtacccgggctgctgaaggtgctggagaccttcgttgcctgcatcatcttcgcgttcatcagcgaccccaacctgtaccagcaccagccggccctggagtggtgcgtggcggtgtacgccatctgcttcatcctagcggccatcgccatcctgctgaacctgggggagtgcaccaacgtgctacccatccccttccccagcttcctgtcggggctggccttgctgtctgtcctcctctatgccaccgcccttgttctctggcccctctaccagttcgatgagaagtatggcggccagcctcggcgctcgagagatgtaagctgcagccgcagccatgcctactacgtgtgtgcctgggaccgccgactggctgtggccatcctgacggccatcaacctactggcgtatgtggctgacctggtgcactctgcccacctggtttttgtcaaggtctaagactctcccaagaggctcccgttccctctccaacctctttgttcttcttgcccgagttttctttatggagtacttctttcctccgcctttcctctgttttcctcttcctgtctcccctccctcccacctttttctttccttcccaattccttgcactctaaccagttcttggatgcatcttcttccttccctttcctcttgctgtttccttcctgtgttgttttgttgcccacatcctgttttcacccctgagccaccgcgcctggccaaggttgtctttattcagtgccggtaggcaggagtccacactataaagtccaaggtcattcctggcagtaaaaggttttttcctgacagtttgtatggggaagccaggaggtaactgtttggcatgttcttgtttggaaacagcgggctctcccattgatagaacactaaagtatcccagg

SEQ ID NO: 111 - DNA, 2487 bp, Homo sapiens
  CDS (62)..(2101)
acggatccttaattaaattaatccccccccccccagagagcagccgggctgccagcgtttcatgatcaacatgggagactcccacgtggacaccagctccaccgtgtccgaggcggtggccgaagaagtatctcttttcagcatgacggacatgattctgttttcgctcatcgtgggtctcctaacctactggttcctcttcagaaagaaaaaagaagaagtccccgagttcaccaaaattcagacattgacctcctctgtcagagagagcagctttgtggaaaagatgaagaaaacggggaggaacatcatcgtgttctacggctcccagacggggactgcagaggagtttgccaaccgcctgtccaaggacgcccaccgctacgggatgcgaggcatgtcagcggaccctgaggagtatgacctggccgacctgagcagcctgccagagatcgacaacgccctggtggttttctgcatggccacctacggtgagggagaccccaccgacaatgcccaggacttctacgactggctgcaggagacagacgtggatctctctggggtcaagttcgcggtgtttggtcttgggaacaagacctacgagcacttcaatgccatgggcaagtacgtggacaagcggctggagcagctcggcgcccagcgcatctttgagctggggttgggcgacgacgatgggaacttggaggaggacttcatcacctggcgagagcagttctggccggccgtgtgtgaacactttggggtggaagccactggcgaggagtccagcattcgccagtacgagcttgtggtccacaccgacatagatgcggccaaggtgtacatgggggagatgggccggctgaagagctacgagaaccagaagcccccctttgatgccaagaatccgttcctggctgcagtcaccaccaaccggaagctgaaccagggaaccgagcgccacctcatgcacctggaattggacatctcggactccaaaatcaggtatgaatctggggaccacgtggctgtgtacccagccaacgactctgctctcgtcaaccagctgggcaaaatcctgggtgccgacctggacgtcgtcatgtccctgaacaacctggatgaggagtccaacaagaagcacccattcccgtgccctacgtcctaccgcacggccctcacctactacctggacatcaccaacccgccgcgtaccaacgtgctgtacgagctggcgcagtacgcctcggagccctcggagcaggagctgctgcgcaagatggcctcctcctccggcgagggcaaggagctgtacctgagctgggtggtggaggcccggaggcacatcctggccatcctgcaggactgcccgtccctgcggccccccatcgaccacctgtgtgagctgctgccgcgcctgcaggcccgctactactccatcgcctcatcctccaaggtccaccccaactctgtgcacatctgtgcggtggttgtggagtacgagaccaaggccggccgcatcaacaagggcgtggccaccaactggctgcgggccaaggagcctgtcggggagaacggcggccgtgcgctggtgcccatgttcgtgcgcaagtcccagttccgcctgcccttcaaggccaccacgcctgtcatcatggtgggccccggcaccggggtggcacccttcataggcttcatccaggagcgggcctggctgcgacagcagggcaaggaggtgggggagacgctgctgtactacggctgccgccgctcggatgaggactacctgtaccgggaggagctggcgcagttccacagggacggtgcgctcacccagctcaacgtggccttctcccgggagcagtcccacaaggtctacgtccagcacctgctaaagcaagaccgagagcacctgtggaagttgatcgaaggcggtgcccacatctacgtctgtggggatgcacggaacatggccagggatgtgcagaacaccttctacgacatcgtggctgagctcggggccatggagcacgcgcaggcggtggactacatcaagaaactgatgaccaagggccgctactccctggacgtgtggagctaggggcctgcctgccccacccaccccacagactccggcctgtaatcagctctcctggctccctcccgtagtctcctgggtgtgtttggcttggccttggcatgggcgcaggcccagtgacaaagactcctctgggcctggggtgcatcctcctcagcccccaggccaggtgaggtccaccggcccctggcagcacagcccagggcctgcatgggggcaccgggctccatgcctctggaggcctctggccctcggtggctgcacagaagggctctttctctctgctgagctgggcccagcccctccacgtgatttccagtgagtgtaaataattttaaataacctctggcccttggaataaagttctgttttctgtaaaaaaaaaa

SEQ ID NO: 112 - DNA, 2107 bp, Homo sapiens
  CDS (1)..(1767)
atgtcgcggaggctgctgccccgggcggagaagcggcgtcggcggctggagcagaggcagcagccggacgagcagcggaggcggtcgggagcgatggtgaagatggcggcggcgggcggcggaggcggcggtggccgctactacggcggcggcagtgagggcggccgggcccctaagcggctcaagactgacaacgccggcgaccagcacggaggcggcggcggtggcggtggaggagccggggcggcgggcggcggcggcggtggggagaactacgatgacccgcacaaaacccctgcctccccagttgtccacatcaggggcctgattgacggtgtggtggaagcagaccttgtggaggccttgcaggagtttggacccatcagctatgtggtggtaatgcctaaaaagagacaagcactggtggagtttgaagatgtgttgggggcttgcaacgcagtgaactacgcagccgacaaccaaatatacattgctggtcacccagcttttgtcaactactctaccagccagaagatctcccgccctggggactcggatgactcccggagcgtgaacagtgtgcttctctttaccatcctgaaccccatttattcgatcaccacggatgttctttacactatctgtaatccttgtggccctgtccagagaattgtcattttcaggaagaatggagttcaggcgatggtggaatttgactcagttcaaagtgcccagcgggccaaggcctctctcaatggggctgatatctattctggctgttgcactctgaagatcgaatacgcaaagcctacacgcttgaatgtgttcaagaatgatcaggatacttgggactacacaaaccccaatctcagtggacaaggtgaccctggcagcaaccccaacaaacgccagaggcagccccctctcctgggagatcaccccgcagaatatggagggccccacggtgggtaccacagccattaccatgatgagggctacgggccccccccacctcactacgaagggagaaggatgggtccaccagtggggggtcaccgtcggggcccaagtcgctacggcccccagtatgggcaccccccaccccctcccccaccacccgagtatggccctcacgccgacagccctgtgctcatggtctatggcttggatcaatctaagatgaactgtgaccgagtcttcaatgtcttctgcttatatggcaatgtggagaaggtgaaattcatgaaaagcaagccgggggccgccatggtggagatggctgatggctacgctgtagaccgggccattacccacctcaacaacaacttcatgtttgggcagaagctgaatgtctgtgtctccaagcagccagccatcatgcctggtcagtcatacgggttggaagacgggtcttgcagttacaaagacttcagtgaatcccggaacaatcggttctccaccccagagcaggcagccaagaaccgcatccagcaccccagcaacgtgctgcacttcttcaacgccccgctggaggtgaccgaggagaacttctttgagatctgcgatgagctgggagtgaagcggccatcttctgtgaaagtattctcaggcaaaagtgagcgcagctcctctggactgctggagtgggaatccaagagcgatgccctggagactctgggcttcctgaaccattaccagatgaaaaacccaaatggtccatacccttacactctgaagttgtgtttctccactgctcagcacgcctcctaattaggtgcctaggaagagtcccatctgagcaggaagacatttctcttttctttatgccattttttgtttttgttatttgcaaaagatcttgtattccttttttttttttttttttttaaatgctaggtttgtagaggcttacttaaccttaatggaaacgctggaaatctgcagggggagggagaggggaactgttatctcccaagattaaccttcacttttaaaaaattattgtacatgtgatttttttttttcctgttcatacatttgtgctgcccatgtactcttggcacatttcaataaaattgtttggaaaataaacacagcaaaaaaaaaa

SEQ ID NO: 113 - DNA, 2305 bp, Homo sapiens
  CDS (527)..(2302)
cactcgtccggcgagaggcagtgacactgatcgggcgcagggggccgagtcggagaccgtgccggagttcgggagcggcaacagagtgggcatagacactccgagcagcctcgccgtcgtctctgcgttcctgttgactgcctggctgccccctcccctactcctcggttcctggtgaagaggctgcgcgctgctgtttggggagggggtgtgtggagccgggtcctgtgtccgcagtggctgctgtcggggggtcgcctgttcgcggaggtgcggagagactccttgggggtcgagcacataacggggttcgggtgtctcgtgtgtgaacatcacaggtctattctggataagcaggttttgtgaagacatttattctttcttggacctcagatttaccagacatctcatgggtttgtggatgcacttagatgtttgcaatgagcactgtggctggcatgccccagtgttttggataccaatgcataggactccatagtaatcgaatttaccagaggcgaacgtcatgagcatagtgatcccattgggggttgatacagcagagacgtcatacttggaaatggctgcaggttcagaaccagaatccgtagaagctagccctgtggtagttgagaaatccaacagttatccccaccagttatataccagcagctcacatcattcacacagttacattggtttgccctatgcggaccataattatggtgctcgtcctcctccgacacctccggcttcccctcctccatcagtccttattagcaaaaatgaagtaggcatatttaccactcctaattttgatgaaacttccagtgctactacaatcagcacatctgaggatggaagttatggtactgatgtaaccaggtgcatatgtggttttacacatgatgatggatacatgatctgttgtgacaaatgcagcgtttggcaacatattgactgcatggggattgataggcagcatattcctgatacatatctatgtgaacgttgtcagcctaggaatttggataaagagagggcagtgctactacaacgccggaaaagggaaaatatgtcagatggtgataccagtgcaactgagagtggtgatgaggttcctgtggaattatatactgcatttcagcatactccaacatcaattactttaactgcttcaagagtttccaaagttaatgataaaaaaaaaaaaaaaagcggggagaaagaacaacacatttcaaaatgtaaaaagggttcagctccagagattgatccttcatctgatggttcaaattttggatgggagacaaagatcaaagcatggatggatcgatatgaagaagcaaataacaaccagtacagtgagggtgttcagagggaggcacaaagaatagctctgagattaggcaatggaaatgacaaaaaagagatgaataaatccgatttgaataccaacaatttgctcttcaaacctcctgtagagagccatatacaaaagaataagaaaattcttaaatctgcaaaagatttgcctcctgatgcacttatcattgaatacagagggaagtttatgctgagagaacagtttgaagcaaatgggtatttctttaaaagaccatacccttttgtgttattctactctaaatttcatgggctagaaatgtgtgttgatgcaaggacttttgggaatgaggctcgattcatcaggcggtcttgtacacccaatgcagaggtgaggcatgaaattcaagatggaaccatacatctttatatttattctatacacagtattccaaagggaactgaaattactattgcctttgattttgactatggaaattgtaagtacaaggtggactgtgcatgcctcaaagaaaacccagagtgccctgttctaaaacgtagttctgaatccatggaaaatatcaatagtggttatgagaccagacggaaaaaaggaaaaaaagacaaagatatttcaaaagaaaaagatacacaaaatcagaatattactttggattgtgaaggaacgaccaacaaaatgaagagcccagaaactaaacaaagaaagctttctccactgagactatcagtatcaaataatcaggaaccagattttattgatgatatagaagaaaaaactcctattagtaatgaagtagaaatggaatcagaggagcagattgcagaaaggaaaaggaagatgaactggacagttgatggatgtggttcctggttctggtttagagctgaagcatctgtcaaggctctgggtcttactcttaatgttctctttggatag

SEQ ID NO: 114 - DNA, 2344 bp, Homo sapiens
  CDS (527)..(2341)
cactcgtccggcgagaggcagtgacactgatcgggcgcagggggccgagtcggagaccgtgccggagttcgggagcggcaacagagtgggcatagacactccgagcagcctcgccgtcgtctctgcgttcctgttgactgcctggctgccccctcccctactcctcggttcctggtgaagaggctgcgcgctgctgtttggggagggggtgtgtggagccgggtcctgtgtccgcagtggctgctgtcggggggtcgcctgttcgcggaggtgcggagagactccttgggggtcgagcacataacggggttcgggtgtctcgtgtgtgaacatcacaggtctattctggataagcaggttttgtgaagacatttattctttcttggacctcagatttaccagacatctcatgggtttgtggatgcacttagatgtttgcaatgagcactgtggctggcatgccccagtgttttggataccaatgcataggactccatagtaatcgaatttaccagaggcgaacgtcatgagcatagtgatcccattgggggttgatacagcagagacgtcatacttggaaatggctgcaggttcagaaccagaatccgtagaagctagccctgtggtagttgagaaatccaacagttatccccaccagttatataccagcagctcacatcattcacacagttacattggtttgccctatgcggaccataattatggtgctcgtcctcctccgacacctccggcttcccctcctccatcagtccttattagcaaaaatgaagtaggcatatttaccactcctaattttgatgaaacttccagtgctactacaatcagcacatctgaggatggaagttatggtactgatgtaaccaggtgcatatgtggttttacacatgatgatggatacatgatctgttgtgacaaatgcagcgtttggcaacatattgactgcatggggattgataggcagcatattcctgatacatatctatgtgaacgttgtcagcctaggaatttggataaagagagggcagtgctactacaacgccggaaaagggaaaatatgtcagatggtgataccagtgcaactgagagtggtgatgaggttcctgtggaattatatactgcatttcagcatactccaacatcaattactttaactgcttcaagagtttccaaagttaatgataaaaaaaaaaaaaaaagcggggagaaagaacaacacatttcaaaatgtaaaaaggcatttcgtgaaggatctaggaagtcatcaagagttaagggttcagctccagagattgatccttcatctgatggttcaaattttggatgggagacaaagatcaaagcatggatggatcgatatgaagaagcaaataacaaccagtacagtgagggtgttcagagggaggcacaaagaatagctctgagattaggcaatggaaatgacaaaaaagagatgaataaatccgatttgaataccaacaatttgctcttcaaacctcctgtagagagccatatacaaaagaataagaaaattcttaaatctgcaaaagatttgcctcctgatgcacttatcattgaatacagagggaagtttatgctgagagaacagtttgaagcaaatgggtatttctttaaaagaccatacccttttgtgttattctactctaaatttcatgggctagaaatgtgtgttgatgcaaggacttttgggaatgaggctcgattcatcaggcggtcttgtacacccaatgcagaggtgaggcatgaaattcaagatggaaccatacatctttatatttattctatacacagtattccaaagggaactgaaattactattgcctttgattttgactatggaaattgtaagtacaaggtggactgtgcatgcctcaaagaaaacccagagtgccctgttctaaaacgtagttctgaatccatggaaaatatcaatagtggttatgagaccagacggaaaaaaggaaaaaaagacaaagatatttcaaaagaaaaagatacacaaaatcagaatattactttggattgtgaaggaacgaccaacaaaatgaagagcccagaaactaaacaaagaaagctttctccactgagactatcagtatcaaataatcaggaaccagattttattgatgatatagaagaaaaaactcctattagtaatgaagtagaaatggaatcagaggagcagattgcagaaaggaaaaggaagatgaactggacagttgatggatgtggttcctggttctggtttagagctgaagcatctgtcaaggctctgggtcttactcttaatgttctctttggatag

SEQ ID NO: 115 - DNA, 9483 bp, Homo sapiens
  CDS (1)..(9354)
atgcggagtaggcttcccccagcgcttgccgccctgggcgcggccctactcctgtcttccattgaggcagaagttgacccaccttcagacttgaattttaaaattatagatgaaaatactgttcatatgtcatgggcagaaccagttgatccaattgtgggttacagaataacggtggaccctacaacggatgggcctactaaagaatttaccctttcagctagtaccactgaaactttattgtcagaacttgtacctgaaacagagtatgtggtgacaataacttcatatgatgaagtagaagaaagtgtaccagttataggacaactaacaattcaaacaggtagttcgacaaagccagtggagaagaaacctggaaaaaccgagatacaaaaatgctctgtcagtgcctggactgatttggttttcctcgtggatggctcttggagtgtgggaagaaataatttcaagtacattttagacttcattgctgctcttgtgtctgcttttgacattggggaagagaagacaagagttggagttgttcaatacagctctgacaccaggactgaatttaacttaaatcagtactaccaaagggatgaacttcttgctgcaataaaaaaaattccatataaaggtggcaacacaatgacaggggatgccattgattatttagttaaaaatactttcacggaatctgctggggcaagagttggctttcctaaagtggcaattattattacggatggaaaatcccaggatgaagtggaaattccagcaagagagcttcgtaatgttggagttgaagttttctccttgggcattaaagctgcagatgcaaaagaactcaaacaaattgcctccacaccttcactgaaccatgttttcaatgtggccaactttgatgcaattgtggatattcagaatgagatcatctcccaggtgtgctcaggagttgatgagcagcttggtgaattggttagtggagaagaagttgttgagcctccttcaaatttgattgccatggaagtctcttcaaaatatgttaagctaaattggaatccatctcctagtccagtgactggctacaaagtcatcctcacaccaatgactgcaggaagccgacagcacgctctgagtgtggggcctcagacaaccacgctcagtgttcgcgacctctcagcagacacggagtaccagatcagtgtttccgccatgaagggaatgacatccagtgaacccatttcaataatggagaagactcagccaatgaaagttcaagtggaatgttcacgtggtgtggatataaaagccgatattgtgtttttggttgatggctcctatagcattgggattgcaaactttgttaaagttagagcctttttggaagttcttgtaaaaagttttgaaatttcaccaaatagggtccagattagtcttgtgcaatacagccgggatcctcatactgagttcactttgaaaaaattcaccaaagttgaagatataattgaagcaataaacaccttcccttacagaggaggatctacaaatactggcaaagcaatgacttatgtcagagagaaaatatttgtgcctagcaagggatcaagaagcaatgtgccaaaggtcatgattcttatcacggatgggaaatcatcagatgctttcagagatcctgcgataaaactgaggaattcagatgttgaaatctttgcagttggtgtgaaggatgccgttcgctcagaattggaagctattgcctctcctcctgcagagacccatgtgttcacagtggaagattttgatgcttttcagaggatatcttttgaactcacacagtctatctgtcttagaattgagcaagaattggcagctataaagaagaaagcttacgtccctccaaaggatcttagtttttcagaagtgacttcttatggtttcaaaaccaactggtctccagctggagaaaatgttttttcatatcacatcacctacaaggaagcggctggggatgatgaggtcactgtggtggagccagcatcgagcaccagtgttgttctcagcagcctgaagccagagaccttgtatttggtcaatgtgactgcggagtatgaggatggcttcagcattcccttagctggagaggagaccaccgaagaagtaaaaggagcacctcgaaacctaaaggtgacagatgagactacagatagtttcaaaattacttggactcaagctccagggagagttttaagatgtcgaattatatatagaccagttgctggtggagagagcagagaagttaccaccccacccaatcagaggaggagaacactggagaacttgattccagacacgaaatatgaagtatctgtaattcctgaatacttctcaggacctggtactccattaactggaaatgcagccactgaagaagttagagggaatccaagagacttaagagtttctgaccctacgacgtctactatgaaattatcttggagtggggcaccaggaaaagtgaaacagtatctcgtcacatataccccagtggcagggggtgaaactcaagaggtcactgtgaggggagatacaaccaatacggtgctgcagggattgaaggaagggacacaatacgccttatctgtgacagcactgtatgcgtctggggctggcgacgccctctttggtgaaggaacaacacttgaagaacgtggttctcctcaagatttagttactaaagacatcactgacacatcaattggggcttattggacatctgctccaggaatggttcgcggttacagggtctcatggaaatcactttatgatgatgttgacactggagagaaaaatctgcctgaagatgcaattcatacgatgatagaaaatctgcagccagagaccaaatacagaatttcagtatttgccacttacagcagtggagaaggagaacctttgactggagatgccacaactgaattatctcaagattccaaaaccctgaaagtagatgaagaaacagaaaacacaatgagagttacatggaaaccagcaccagggaaagtcgtcaactaccgtgttgtctatcgccctcatgggagagggaagcaaatggttgctaaggtgccccccacagtcacttcgacagtgttaaagcgacttcagccacagaccacatatgacatcacagttcttcctatttacaagatgggagaaggaaagcttaggcaaggatcaggaacaacagcttctcggtttaagtctcctagaaacctcaaaacatctgacccaaccatgtcaagcttccgagtgacttgggagcctgcccctggggaagtgaagggttataaagtcacattccaccctacgggggatgacagaagactgggggagttagtggttggaccctatgacaacacagttgttttggaggaacttagggctggtaccacctataaagtaaatgtttttggaatgtttgatggaggagaaagctcaccacttgttggacaagaaatgacaaccctttccgacacaactgttatgccaattttatcttctgggatggagtgtctcaccagagctgaggcagacattgtgttgctggtggatggatcatggagcatcggccgggcaaattttagaaccgtgaggagtttcatttctcgtattgtggaagtctttgacattggccccaaaagagtacaaattgctcttgctcagtatagtggggatcccagaacagagtggcagttaaatgcacacagagacaagaagagcttgttgcaagctgtggcaaacttgccgtacaaaggaggcaatactctcacaggcatggctttgaatttcattcgccaacagaacttcaggacccaagctggcatgagacctcgagctcgaaaaattggtgtgctcattactgatggaaaatcacaagacgatgttgaagcaccttcaaagaaactcaaggatgagggagtggagctgtttgctattggtattaaaaatgctgatgaagtcgaattaaagatgattgcaactgatcctgatgatacccatgactacaatgtggcagattttgagtcactctccaggatagtggatgatctcaccattaatttgtgtaacagtgtcaaaggtccaggtgatttggaagcaccttctaacttagttatttctgagcgaacccatcgttcttttagagtgagctggacaccaccttctgacagtgtggatcgatataaggtggaatactatccagtttctggagggaaacgtcaagaattttatgtgagtcgaatggaaactagcacagtgctgaaagatctgaaacctgaaactgaatatgttgtcaatgtgtattctgtggtagaagatgaatatagtgagcctctgaaggggacagaaaaaaccttgccagtgcctgtagtcagcctgaatatttatgatgttggccctaccaccatgcatgtgcagtggcagcctgtgggaggagctactggctacatcttgtcatacaaacctgttaaggacacagagccaacaagacccaaagaggtgcgtttggggccaacagtgaatgacatgcagctgactgaccttgttcccaacacggagtatgcagtcacagtccaggctgtcctgcacgacctcactagtgaacctgtcactgttcgggaagtcaccttgcctttacccagacctcaggatctgaaactcagagatgtgactcacagcactatgaatgtcttttgggaacctgtgcctggaaaagtgcgtaaatatattgttcgatacaaaacaccagaagaggatgtcaaagaggtagaggtggacagatcagagaccagcacttccctcaaagacctcttctcacagaccttgtacacagtcagcgtttctgcagtacatgacgagggggagtctcctccagtgactgctcaagaaactacccgacccgtgccagccccaacaaacttaaagattactgaagtaacatcagagggtttcagagggacttgggatcatggagcttcagatgtgtctctctacagaataacttggggaccttttggaagctcagataagatggagaccatcttaaatggagatgaaaacactttggtgttcgaaaacctgaaccccaacaccatctatgaagtttccattactgccatctatgctgatgagtcagaaagtgatgacctgattggcagtgagcgcactctgcctatcttaacaacacaagctcccaaaagtgggccacgaaaccttcaagtgtacaatgcaacatctaacagcctgactgttaagtgggatcctgctagtggtcgtgtgcagaaatataggatcacttatcagccttccacaggggaaggcaatgagcaaacgaccacaataggaggacggcagaacagtgtggtcctgcagaaactgaagccagacactccttacactatcaccgtatcctctctgtatcctgatggtgaaggaggtcggatgacgggaagaggcaagaccaaacctctaaacactgtaaggaacctgagagtgtatgacccttctaccagcactctgaatgtccgctgggaccatgcagagggaaatcctcgtcagtacaagctcttctatgcaccagcagcaggtggtccagaggaactggtaccaatccccgggaataccaattatgccattcttaggaatctgcagccagatacctcatacactgtgactgtagttcccgtttatactgaaggtgatgggggacgcacatcagatactggaaggacattgatgagaggactggcaagaaatgtccaagtatacaatcctacacctaacaggctcggtgttcgctgggaccctgcaccaggacctgtgctgcaatatcgcgttgtgtattctcctgtggatggcacaagaccctcagaatctatagtagtgccaggaaacacgcgcatggtgcatctggagcggctgattccggacacactctattccgtgaaccttgtggctctgtactcggatggagagggaaatcccagccctgcccagggccgaacgctaccacgcagtggaccaaggaacctgagagtctttggtgaaacaaccaatagcctctcggtagcctgggatcatgctgatgggccagttcagcagtacaggatcatctattctcccactgttggtgatccaattgatgaatataccacagtcccaggcagaagaaacaatgtaatactgcagcccctgcaacctgacactccatataaaattactgttattgctgtttatgaagatggagatggtggccatctaacaggaaatggaagaactgtgggactccttcctcctcagaacatacacatctctgacgaatggtatacaagattcagggtgtcctgggatccttcaccttctccagttcttggatataaaatagtatataagccagtgggttccaatgagcccatggaagcctttgttggagaaatgacatcatataccttacacaatctcaatcccagcaccacctacgatgtgaatgtttatgctcaatatgattctggactcagtgtccccttgacagatcaaggcactacattatatttaaatgtaacagatctgaaaacttaccagattgggtgggatacattctgtgtcaaatggtcacctcaccgggcagccacctcctacaggctaaaactaagccctgcagatggaaccaggggacaagaaattacagtgcgtggatcagaaaccagtcactgcttcactggcctttcaccagacactgattatggtgtcactgtttttgtgcagacaccaaatctcgagggaccaggagtctctgttaaagaacataccactgtgaaaccaacagaagcccctacagagccacccacacctcctccccctcccaccattccaccagcccgggatgtatgcaaaggggccaaggcagatattgtgttcttgactgatgcctcctggagcattggggacgataattttaacaaagttgtaaaattcatcttcaatactgtgggaggctttgatgaaatcagtcctgctgggattcaggtttcatttgtgcaatacagcgatgaggtcaagtctgagttcaagctgaacacgtacaatgacaaggccctagcccttggggccctccagaatattaggtacagaggaggaaacacaagaacaggcaaggccctcacgtttatcaaggagaaagtcttgacttgggagagcggcatgaggaagaatgtccctaaggtgttggttgtggtcacggacggtcggtcccaggatgaggtcaagaaggcggctttggtcatccagcagtcagggttcagtgtctttgtagttggtgtggctgatgtcgactacaatgagcttgccaacattgccagcaaaccaagtgaacggcacgtgttcattgtggacgactttgaatcttttgagaagatcgaagacaatcttattacatttgtttgtgaaactgccacttcaagttgtcctctcatttatttggatggctacacctcaccaggttttaaaatgcttgaagcatacaacctgacagaaaagaattttgcttctgtacaaggagtatctttggagtcagggtctttccccagctactcagcatacaggattcagaagaatgcgtttgtgaatcagcctacagcagacctacacccaaatggactccctccttcatacacgattatattattattcagacttctcccagaaactcccagtgacccttttgcaatttggcaaatcacagacagagactacaaaccacaagttggagtgattgcagatccttctagcaagacgttatcattctttaacaaggatacaagaggcgaggtgcaaactgttacatttgacacagaagaagtaaagacattattttatggaagttttcacaaggttcatattgtagtgacctcaaaaagtgttaagatttacattgactgctatgaaattatagaaaaagacatcaaggaagctggaaatataacaactgatggttatgaaattcttggaaaactccttaaaggggaaaggaaatcagccgcattccaaatccagagttttgacattgtctgcagtccagtgtggaccagtagagacagatgctgtgatattccctctaggagagatgagggaaaatgccctgcttttccaaattcttgcacatgtacacaggacagcgttggacctccaggacctccaggccctgcaggaggacctggtgctaaaggtcccagaggtgaaagaggtatcagtggggcaattgggccccctggtcctcgtggagacataggtcctccaggcccccagggtcctccaggccctcagggacccaatggactctctattccgggagagcaaggtcgccaagggatgaaaggtgatgctggagagccaggacttccaggccgaacaggaaccccaggattacctggcccaccaggaccaatgggacctccaggagacagaggcttcactggaaaagacagtgcaatgggacccaggggcccaccagggcggccgggaagcccaggctccccaggagtcacaggaccaagtgggaagccaggaaaacctggagatcatggcagaccaggtccatctgggttgaaaggagaaaaaggtgataggggagacattgcttcccagaacatgatgcgagcagttgcaagacaagtctgtgaacaattgataagtggtcagatgaacagattcaatcagatgctgaatcagattccaaatgattaccagtccagtcgcaaccagccaggcccgccgggtccaccgggacctcctggtagcgcaggagccagaggagaacctgggcctggggggcggccaggcttcccgggcacaccagggatgcagggaccccctggggaacgaggtttgccaggagagaaaggtgaaaggggtactggatcttcaggacctcgggggctgcctgggcccccaggtccacaaggagaatccagaacaggtccaccagggtccacaggttcaagaggtccccctggcccccctggccgtcctggaaactcaggtatccagggccccccaggtcctcctggatactgtgattcttctcagtgtgccagcatcccatacaacgggcaaggctatccagagccttacgtgcccgagggcggggcctacctgcctgagcgcgagcccttcatcgtgccggtggagcccgagcggacagcggaatacgaggactacggcgcagacgagcctgcagaggagcctcctgagccccaccggcgctggcggcgcgccctgccccacggacccgggcagtgaaccagagatcacgcgccgcgccgcgaggcttgggggaggtgttgaaattctcatttacaggtcagatagagcagtgtacgtcttttctgaggtgtttcttccagcgttgctcatccaggagtaccc

SEQ ID NO: 116 - DNA, 427 bp, Homo sapiens
  CDS (266)..(364)
tccctctgggaaaaagcttccagaggaaggagcaggcagtaatttttgctgttctgcagcctccgctggtgatatcgaggcaaacagggtctgcagtggacctccagcaaacaccagcaggcctgcagaagaggggcctgactattagaaggaaaactaacaaatagaaagcagtagcctcaacgtcaacaaaaaggacaaccacacaaaaaccccatctgaaggtcaccagcatcaaagaccaaaggtagataaatccctgaagatgaggaaaaagcagcgcaaaaaggctgaaaattccaaaaaccagaatgcctcttctcctccaaaggagcacaactcctcgccagcaaaggaacaaaactgaacagagaatgagtttgatgaattgacagaagtaggcttcagaaggtaggtaataacagag

SEQ ID NO: 117 - DNA, 640 bp, Homo sapiens
  CDS (464)..(553)
gccctgggccaaatgtgcctgatgggaacagacttgcagggccatgcaggccagacttcgtgccttaactgaagagtgtgcgtgtgtgtgtgtgagagagagagagagagagaaacacgcatcatgggtccctgatctatgaaatgaacacaacctctctgaggctggatgatctggaggaagggggcatggagcaaatttgaggctctgattgctgagccagcctcctcccaggcggtttccccaggactctcgtaggaaataaatagccctttcaagattcctcagctgcctcaccccctgcacatgtgcctggggtgtggcctagaagggagtgatgttcttactctggtggtctgtgcttctgaacacaggctacatgcacacactgacaactaccaataaacagacaggggaaggtctttcatctcagccattttctcttccccccgcccccccttagatggagtcttgctctgtcacccaggttggagtgcagtggcacaatcagctcactgcaacccctcctcctaggttcaagcgattgagtagctgagattacaggcatgcatcactatgcctggctttttgtattttttagtagagatggggtttaccatgttgggccaggctagtctca

SEQ ID NO: 118 - DNA, 481 bp, Homo sapiens
  CDS (130)..(285)
  misc_feature (1)...(481): n = a,t,c or g
agggatgccggggtccgnnaactgatgcccctgnagcgatcgtacggnctcaannnatgggncgacccacgcgtccgcccacgcgtncggcacaagaaaagatgcttaacatatttaaccattaaataaatgcaaattaaaaccaagatgagatatcacttcacacactctaggatgtttatagttaaaaaagatagtaaatgctggcaaatatgtggagaaattgaaatcctcacacactgctgttggaaatgtacaatggtacagtcactttggaaaatagtctaaccgttcctcaaaatgatggagaaaatgaggagtgagttctaataggtatgggcttcctttgggggtgatgaaaatgttcttaaattgatcatggtaatggttgcacaaccctgtgcatatactaaaacccattaaattttgtacttaaattgggtgaattgtggaataatattgttaataatatctcaataan

SEQ ID NO: 119 - DNA, 1319 bp, Homo sapiens
  CDS (948)..(1106)
ttttttttttttgccattgagttgttggagtttcttatacattttggatactagcccttttatcagatatatggtttgcaaatattctcttcccctctgtaggttgctttttcattctgattatttcccttgctgtgcagacactttttagtttgacgttgtccaacttgtttgttttgcttttgttgcctgtgcttttggtgtcacatctaaaatatcattgctttttccctatgttttttttctaggagttttacagtttcaggtcctgtgtttaagtctttaatccatgggtagatggccaaaaggacgaagtcaggatctcaaagaggtatctgtacccccgtgttcactgaagcattattcataatggccaagatacggaaacaactcatgtgtctactgacagaagaatggatcaagaaaatggagtatattctgaccgggcacgctggctcacgcctgtaatcccatcaatttagaaggccaaggcaggtgaatctcttgaggccaggagttcgagaccagcctgggcctcccagagtgctgggattgcaggtgtgagccactgcgcccggcccctggctttgggttttctgctcaccttcctccttccctcccacaaatactatgtgtcccaaatgtgccgggatccatgccttgtgctggggacacagaggggaccgatgccatcctggtcatgggggaggatgtggcattttcatgaagagctatgatcgagggggccccacggttgcttcaggagcccagagtaggcatctgaccctgccaggcgtgctcccagacaaggtgacaatggtgctgaggtgcccgagaggaatgagcctcagatactggactgtcagacgtggacatgggggtaagcacagggtccctaccttgcaaggcacgagcccctgacagcctcttctctttccaggtcagccatgtcatctgagcctcccccaccaccacagccccccacccatcaagcttcagtcgggctgctggacacccctcggagccgtgagcgctcaccatcccctctgcgcggcaacgtggtcccaagcccactgcccactcgccggacgaggaccttctcggcgtgagtctggagcaaggctggggacgcgttctcagatggatctcttgcctgaggccagagattcactgtgtctctggccatttttgggcctatgtcccggactgccaaataggcagacctggggctgggccgtgggctgagggtgagaaactaggaaggcgccttgtaaattcagggtactgcccagcccagaagaacctgttaccagctggga

SEQ ID NO: 120 - DNA, 1555 bp, Homo sapiens
  CDS (86)..(1486)
ttggcacgagggtagtgggggctgcagctgccggacccaggcactgacccttgacctccggtggctcccccatctctcaggcgcgatggctacgggcgcggatgtacgggacattctagaactcgggggtccagaaggggatgcagcctctgggaccatcagcaagaaggacattatcaacccggacaagaaaaaatccaagaagtcctctgagacactgactttcaagaggcccgagggcatgcaccgggaagtctatgccttgctctactctgacaagaaggatgcacccccactgctacccagtgacactggccagggataccgtacagtgaaggccaagttgggctccaagaaggtgcggccttggaagtggatgccattcaccaacccggcccgcaaggacggagcaatgttcttccactggcgacgtgcagcggaggagggcaaggactacccctttgccaggttcaataagactgtgcaggtgcctgtgtactcggagcaggagtaccagctttatctccacgatgatgcttggactaaggcagaaactgaccacctctttgacctcagccgccgctttgacctgcgttttgttgttatccatgaccggtatgaccaccagcagttcaagaagcgttctgtggaagacctgaaggagcggtactaccacatctgtgctaagcttgccaacgtgcgggctgtgccaggcacagaccttaagataccagtatttgatgctgggcacgaacgacggcggaaggaacagcttgagcgtctctacaaccggaccccagagcaggtggcagaggaggagtacctgctacaggagctgcgcaagattgaggcccggaagaaggagcgggagaaacgcagccaggacctgcagaagctgatcacagcggcagacaccactgcagagcagcggcgcacggaacgcaaggcccccaaaaagaagctaccccagaaaaaggaggctgagaagccggctgttcctgagactgcaggcatcaagtttccagacttcaagtctgcaggtgtcacgctgcggagccaacggatgaagctgccaagctctgtgggacagaagaagatcaaggccctggaacagatgctgctggagcttggtgtggagctgagcccgacacctacggaggagctggtgcacatgttcaatgagctgcgaagcgacctggtgctgctctacgagctcaagcaggcctgtgccaactgcgagtatgagctgcagatgctgcggcaccgtcatgaggcactggcccgggctggtgtgctagggggccctgccacaccagcatcaggcccaggcccggcctctgctgagccggcagtgactgaacccggacttggtcctgaccccaaggacaccatcattgatgtggtgggcgcacccctcacgcccaattcgagaaagcgacgggagtcggcctccagctcatcttccgtgaagaaagccaagaagccgtgagaggccccacggggtgtgggcgacgctgttatgtaaatagagctgctgagttggaaaaaaaaaaaa

SEQ ID NO: 121 - DNA, 1654 bp, Homo sapiens
  CDS (86)..(1585)
ttggcacgagggtagtgggggctgcagctgccggacccaggcactgacccttgacctccggtggctcccccatctctcaggcgcgatggctacgggcgcggatgtacgggacattctagaactcgggggtccagaaggggatgcagcctctgggaccatcagcaagaaggacattatcaacccggacaagaaaaaatccaagaagtcctctgagacactgactttcaagaggcccgagggcatgcaccgggaagtctatgccttgctctactctgacaagaaggatgcacccccactgctacccagtgacactggccagggataccgtacagtgaaggccaagttgggctccaagaaggtgcggccttggaagtggatgccattcaccaacccggcccgcaaggacggagcaatgttcttccactggcgacgtgcagcggaggagggcaaggactacccctttgccaggttcaataagactgtgcaggtgcctgtgtactcggagcaggagtaccagctttatctccacgatgatgcttggactaaggcagaaactgaccacctctttgacctcagccgccgctttgacctgcgttttgttgttatccatgaccggtatgaccaccagcagttcaagaagcgttctgtggaagacctgaaggagcggtactaccacatctgtgctaagcttgccaacgtgcgggctgtgccaggcacagaccttgctgggcacgaacgacggcggaaggaacagcttgagcgtctctacaaccggaccccagagcaggtggcagaggaggagtacctgctacaggagctgcgcaagataccagtatttgatgctgggcacgaacgacggcggaaggaacagcttgagcgtctctacaaccggaccccagagcaggtggcagaggaggagtacctgctacaggagctgcgcaagattgaggcccggaagaaggagcgggagaaacgcagccaggacctgcagaagctgatcacagcggcagacaccactgcagagcagcggcgcacggaacgcaaggcccccaaaaagaagctaccccagaaaaaggaggctgagaagccggctgttcctgagactgcaggcatcaagtttccagacttcaagtctgcaggtgtcacgctgcggagccaacggatgaagctgccaagctctgtgggacagaagaagatcaaggccctggaacagatgctgctggagcttggtgtggagctgagcccgacacctacggaggagctggtgcacatgttcaatgagctgcgaagcgacctggtgctgctctacgagctcaagcaggcctgtgccaactgcgagtatgagctgcagatgctgcggcaccgtcatgaggcactggcccgggctggtgtgctagggggccctgccacaccagcatcaggcccaggcccggcctctgctgagccggcagtgactgaacccggacttggtcctgaccccaaggacaccatcattgatgtggtgggcgcacccctcacgcccaattcgagaaagcgacgggagtcggcctccagctcatcttccgtgaagaaagccaagaagccgtgagaggccccacggggtgtgggcgacgctgttatgtaaatagagctgctgagttggaaaaaaaaaaaa

SEQ ID NO: 122 - DNA, 1284 bp, Homo sapiens
  CDS (321)..(1067)
gcacgaggtcagacaagcactggacgtggcggccattttgttttggacaccgagcaggagctggcggccgctgcagacgaaaggcaggaaagggcaggccgggtgagcagacggatcggccgactagacagccaaccagcaacaacgaactgagctcgcatactaccgcttacgcatctaaccaaccgcccatctagctaacccgagcccctccaccgtcaactcaggttcggccggtccccggcccgcctgccggagccgtggtggcagccccgggaggagcactggcgtctgtttccttcgattctcgggattcgaagatggctgcacagtcagcgccgaaagttgtgctaaaaagcaccaccaagatgtctctaaatgagcgctttactaatatgctgaagaacaaacagccgacgccagtgaatattcgggcttcgatgcagcaacaacagcagctagccagtgccagaaacagaagactggcccagcagatggagaatagaccctctgtccaggcagcattaaaacttaagcagaagagcttaaagcagcgcctgggtaagagtaacatccaggcacggttaggccgacccataggggccctggccaggggagcaatcggaggacgaggcctacccataatccagagaggcttgcccagaggaggactacgtgggggacgtgccaccagaaccctacttaggggcgggatgtcactccgaggtcaaaacctgctccgaggtggacgagccgtagctccccgaatgggcttaagaagaggtggtgttcgaggtcgtggaggtcctgggagagggggcctagggcgtggagctatgggtcgtggcggaatcggtggtagaggtcggggtatgataggtcggggaagagggggctttggaggccgaggccgaggccgtggacgagggagaggtgcccttgctcgccctgtattgaccaaggagcagctggacaaccaattggatgcatatatgtcgaaaacaaaaggacacctggatgctgagttggatgcctacatggcgcagacagatcccgaaaccaatgattgaagcctgcccatcctcccatgagagactcttgttagtcaacacatctgtaaataaccttgagataacagatgagaagaaatctgattgatgctggatggacctatcacaataggctgtggacttacttgccaccagcttgtgcatttagtgtgttccttttactttttgatactgtgttgtatgaaacccttttgtcctttgaaaaaaaaaaaaa

SEQ ID NO: 123 - DNA, 1934 bp, Homo sapiens
  CDS (338)..(1162)
ggatgggatgaggggcgaggcttgggaggcgaccaatcgaagagtagaatgctgcgtccctcactggagcttcagcggtcggaacgcgggggtggggcatgtcctgccgaaatttgcgtccttagagcggaagtacggccggaagcccgccatagagtttagtggccagagcgactcttcagggaggtggcaggaaaggcttggaacagctgccggaggtgacggagcggcggccccgcccggtgcgctggaggtcgaagcttccaggtagcggcccgcagagcctgacccaggctctggacatcctgagcccaagtcccccacactcagtgcagtgatgagtgcggaagtgaaggtgacagggcagaaccaggagcaatttctgctcctagccaagtcggccaagggggcagcgctggccacactcatccatcaggtgctggaggcccctggtgtctacgtgtttggagaactgctggacatgcccaatgttagagagctggctgagagtgactttgcctctaccttccggctgctcacagtgtttgcttatgggacatacgctgactacttagctgaagcccggaatcttcctccactaacagaggctcagaagaataagcttcgacacctctcagttgtcaccctggctgctaaagtaaagtgtatcccatatgcagtgttgctggaggctcttgccctgcgtaatgtgcggcagctggaagaccttgtgattgaggctgtgtatgctgacgtgcttcgtggctccctggaccagcgcaaccagcggctcgaggttgactacagcatcgggcgggacatccagcgccaggacctcagtgccattgcccgaaccctgcaggaatggtgtgtgggctgtgaggtcgtgctgtcaggcattgaggagcaggtgagccgtgccaaccaacacaaggagcagcagctgggcctgaagcagcagattgagagtgaggttgccaaccttaaaaaaaccattaaagttacgacggcagcagcagccgcagccacatctcaggaccctgagcaacacctgactgagctgagggaaccagctcctggcaccaaccagcgccagcccagcaagaaagcctcaaagggcaaggggctccgagggagcgccaagatttggtccaagtcgaattgaaagaactgtcgtttcctccctggggatgtggggtcccagctgcctgcctgcctcttaggagtcctcagagagccttctgtgcccctggccagctgataatcctaggttcatgacccttcacctcccctaaccccaaacatagatcacaccttctctagggaggagtcaaatgtaggtcatgtttttgttggtactttctgttttttgtgacttcatgtgttccattgctccccgctgccatgctctctcccttgtttccttaagagctcagcatctgtccctgttcattacatgtcattgagtaggtgggtagccctgatgggggtcgctctgtctggagcataacccacaggcgttttttctgccaccccatccctgcatgcctgatccccagttcctataccctacccctgacctattgagcagcctctgaagagccatagggcccccacctttactcacaccctgagaattctgggagccagtctgccatgccaggagtcactggacatgttcatcctagaatcctgtcacactacagtcatttcttttcctctctctggcccttgggtcctgggaatgctgctgcttcaaccccagagcctaagaatggcagccggtgtctaaacaggtgaagagatgaatccttctttgggcctggcactctcggggaagcttgatggcaatcctggaaagggtttaaagcccctttggtgaggtttgggggggaagcgaagagggaggttgtggtgagttgtattattttttt

SEQ ID NO: 124 - DNA, 692 bp, Homo sapiens
  CDS (74)..(442)
gcggtggaattcgcgggacccaaccgcggcgaccggacgtgcactcctccagtagcggctgcacgtcgtgccaatggcccgctatgaggaggtgagcgtgtccggcttcgaggagttccaccgggccgtggaacagcacaatggcaagaccattttcgcctactttacgggttctaaggacgccggggggaaaagctggtgccccgactgcgtgcaggctgaaccagtcgtacgagaggggctgaagcacattagtgaaggatgtgtgttcatctactgccaagtaggagaaaagccttattggaaagatccaaataatgacttcagaaaaaacttgaaagtaacagcagtgcctacactacttaagtatggaacacctcaaaaactggtagaatctgagtgtcttcaggccaacctggtggaaatgttgttctctgaagattaagattttaggatggcaatcatgtcttgatgtcctgatttgttctagtatcaataaactgtatacttgctttgaattcatgttagcaataaatgatgttaaaaaaaactggcatgtgtctaaacaatagagtgctattaaaatgcccatgaacctttagtttgcctgtaatacatggatatttttaagatataaagaagtcttcagaaatagcagtaaaggctcaaaggaacgtattcttgaaggtgac

SEQ ID NO: 125 - DNA, 473 bp, Homo sapiens
  CDS (257)..(406)
ccactcagcacccatagtccaggcatggggacctcaacacacctgagccccagacatcacctttcattgtgagtagctctgagatgacacttctgctgttcccaattccagcattaattggattagatagttattttatgaagaattttcatatgccacaatcctgaccatatcttcaagtgaacagaaaaattctattaaaaagtcaaccttctgtctcactctgttgcccagactggagtgtagtggtgcaattatggctcactgcagcctcaacctcctgggctcaagcaatcctcctgcctcagcctcacaagtagctgggactacaggtgcttgtcaccacacctcactaattttcccatttgtgttatatgtggattccacaggactgactttgaaaacttgagtatgcgtggattttggtatacacagaaatgggagagctggaactaatccccccatataccaag

SEQ ID NO: 126 - DNA, 1174 bp, Homo sapiens
  CDS (560)..(853)
cgaagccgccgcctgatactggcattttgtagatgtggtttgactatttctgtatgtctccatctattgatgagggtcttactcttttagtataaatagtaccgttaacttccaattaactagttttgacaacattcaaaaaagagtaataaacttcgccttaattttaataatcaacaccctcctagccttactactaataattattacattttgactaccacaactcaacggctacatagaaaaatccaccccttacgagtgcggcttcgaccctatatcccccgcccgcgtccctttctccataaaattcttcttagtagctattaccttcttattatttgatctagaaattgccctccttttacccctaccatgagccctacaaacaactaacctgccactaatagttatgtcatccctcttattaatcatcatcctagccctaagtctggcctatgagtgactacaaaaaggattagactgaaccgaattggtatatagtttaaacaaaacgaatgatttcgactcattaaattatgataatcatatttaccaaatgcccctcatttacataaatattatactagcatttaccatctcacttctaggaatactagtatatcgctcacacctcatatcctccctactatgcctagaaggaataatactatcgctgttcattatagctactctcataaccctcaacacccactccctcttagccaatattgtgcctattgccatactagtctttgccgcctgcgaagcagcggtgggcctagccctactagtctcaatctccaacacatatggcctagactacgtacataacctaaacctactccaatgctaaaactaatcgtcccaacaattatattactaccactgacatgactttccaaaaaacacataatttgaatcaacacaaccacccacagcctaattattagcatcatccctctactattttttaaccaaatcaacaacaacctatttagctgttccccaaccttttcctccgaccccctaacaacccccctcctaatactaactacctgactcctacccctcacaatcatggcaagccaacgccacttatccagtgaaccactatcacgaaaaaaactctacctctctatactaatctccctacaaatctccttaattataa

SEQ ID NO: 127 - DNA, 4105 bp, Homo sapiens
  CDS (112)..(1215)
cgactcccgctcgtgccccggagtcaccgccgtccgcggatccggcgctagtagcggggcctgccgaggaagccgagtgcccgccgccgcgccagcctcagcccgcgcagaatgtgctcgctgccccgcggcttcgagccccaagctcccgaggacttggcgcagcggagtttggtggagctgcgggaaatgttgaagcgccaggagagacttttgcgcaacgaaaaattcatttgcaaattgcccgacaaaggtaaaaagatctttgactcttttgccaaactgaaagctgccattgcagaatgtgaagaagttagaagaaaaagtgaactgtttaaccctgttagtttagactgtaagctaaggcaaaaagcaattgcagaagttgatgtgggtacagataaggcccagaattctgacccgatacttgatacttcatcactagttcctggatgttcctctgtagataacatcaagtcatctcaaacctcacaaaaccagggacttggacgtcctactcttgaaggtgatgaagagacttcagaggttgagtacacagtgaataagggcccagcttccagcaatagagacagggtaccaccttcatctgaagctagtgagcatcacccgcggcatcgtgtttcaagtcaagcggaagatacttccagcagctttgacaacctgtttattgacaggttacagaggatcaccattgcggaccaaggtgaacaacagtcagaagaaaacgcaagtactaagaacttgacaggcctttccagtgggactgagaagaaacctcattacatggaagtgctagaaatgcgagccaaaaacccagtgccccagctgcgtaaatttaaaaccaatgtgttaccttttcgacaaaatgattcatctagtcattgccagaagagtgggtctcctatttcctcagaagagcggcggcgcagggataagcagcatcttgatgacatcacagcagctcggcttctaccacttcaccatatgcccacgcagctgctctccatagaagaatccttggcacttcagaaacagcagaaacagaattatgaggagatgcaagcaaagctcgcagcgcaaaaattagctgaaagactgaatattaaaatgcggagttataatccagaaggggagtcttcagggagataccgagaagtaagggatgaagatgacgattggtcctctgatgaattctgaagataatctcctaaatcactgacgttgagatgtcatcatcttacatcagactttctaactagtatcaagatcagtgtcagatattgttgagggaagtaattttataaagttacacaaaggtagttataaaaaaagcccagtttgtctttcagaaggtgactttcatgtgcttgaaaagtttaatatttgaatattgtgtttaaccacatggtattaaaattttgcaatatattgtgtattggtctgatattttagtatatagtagaacatactttttttttctttaagccaaatgaaaagaggtaactttgcttttttcctttttcttacctatcaaatagcatttattacatgtctttcagtgaaatacttagttgttccaggcacctaaaatcaattaggaagacatagttcccttcttttttgggtaatgaagggagcagtctaaagaattgtatgcatgtttgcatggggttattgagacattggatgtgaaatacctaggaagacatgtatggagaatgcttaacaaatgctcttctcctttttctgtcttcccttaggaagaacgttatctctcttctgattaggaaggacttcccttttgagtagatgctggaaagtggaggttttttttgttggtttgtttgtttggttttgtgtttttttttgagatggggtcttgctctgtcgcccaggctggagtgcagtggcaggatctcggctcactgcaatctaggtggaggtctttttaaataacctcatgttacttcaggcaaatctggtacaggagaagcccaagctaactgagctgggtgaaggcttgtgcatcacctggcttgagttccttgctgtcacagatgataggttcatgtacacaacattaatgtttgataaggaaagcattttttttttgttaaaattgaattgtcagtactttacttttttccccccaaataggtatatatagactgcagaagcttcagtcccatatataaacgttcatgtcattttagaggattatatggttgtctccagagaaattaacttacattatcaaaaaattctttgtctaatatattggagtctttaaaagtgttgaagaataaaatattaattagaacaacttcaaatgctaaggtgatgttttaccgggacttaattaaatacaactttttcctttcgaaaaagactgttcacatttgcttccaggtgtaattattgctttcattccttacccccctcaagcaaatgtgaaaagtatactgacctaagattctcattagttttagttcttaaaacgaatagtaaatgatttcacagcgtaaaatttgatgttatttctggaagctggatgatatggaagagttcatgtgcctggacacacagttccctgtaatcctgccatctagggagataaactctgttaacattttgatgttgtgtttttgcttatttttctatgcatagttatgcatttatattctcaaaaatgaaatcataatgtacattgctttgtagtctgctctatatattgtcaatatgttcccatattaaatattttgctttttagacagctgtaggatattttatttcatgggtataccataactttaagatttatttcctattcagcaatttgattatgtattataatgtaatctgtaaatagtgatatgattaacatcttaatcacatccatagaaaatgacttatttccagaagataccgctctaaaaatgaaattgttaggtgaaagtgtttttgagaatttttatatatattactcactgcagagatcatgttcatttacattcccattagcaatatatccaatgctcagaattgaaaattactacttaaaatctttgcaaattgaataattacagaaaagggctacatttaaaatttgtatttgtttttcttacttagtgaaggttgtgttttttttcatattcattggccatgctatattcattcttttgagaattgctcattcatattttttctgttgcttgcttggagaatttgctctttttttggcatataagttcttaagaatgtccgtcctttgtcatatattgtaactttttttaaccttatttgtcatttaacatagtttgtggtatttcagtatagaagttgttttctttaggagtctacctttgtgtatgtgcttgaaagtatttttgtaatccaagaatggataaatgtccttattttcttctagtattttcttatttcacttttacacctatctttaaaaggaatttaaattttgtttatatacattaactaaatcagtacaagtttggggtgaaaaggaaatttttaatccatctcaaatgtatttggttatattatataaggtagggatttgattttatttcgaagaatttaccaattggttcagtatgtgaaaccaccatttcccctctgattagtaatgctatttttatagaatattaaattcttatgtgtcttttgtgtcttaggccaatttctgggccttctgggttttttctacactgtcaataattatcgctttaattggtgttaatatttggtagtacacaggttctcccttgttcttttaaattttgtgaaatataacttacaaataagtacttaaaacagagcttaatgggtaaagcaacagctgtgtaatcacaaactagatgcagaggaggtcttgccagcactccaaaatctctgtgtgtcccctcttgacactcactgtttcccccagagctaactatcctgacgtatggtaattctccctctgtccttttaagaattattttaccagttatgtgtataacaatatggtttacattttgctcacttttgacttatataaaaatagaataatactaaaaaaaaaaaa

SEQ ID NO: 128 - DNA, 2495 bp, Homo sapiens
  CDS (525)..(2135)
tcacgttgtcttcggtagtcctgagcgccgggcctgaaggactcctaggcgtggagcagagcgacaaaacagaccagtttctagtgacagacagcggcaggacagtcatcctctataaggtttctgatcagaaacccttggggagctggtcagtgaaacaaggtcaaattataacatgtccagctgtgtgcaactttcaaactggagagtatgttgttgtacacgataataaggttttaagaatatggaataatgaagatgtaaacctggataaagtatttaaagctacattgtcagcagaagtatataggatactttcagtgcaagggacagaacccttggtgctcttcaaggaaggtgctgttcgtggtttagaggccttgcttgcagacccccagcagaaaattgaaactgttatctctgatgaagaagtgattaaatggacaaagtttttcgtagtattcagacatcctgttttaatttttattactgaaaaacatggaaattactttgcttacgtgcaaatgtttaactcacgtatcttaaccaaatatacactcttacttggacaagacgaaaactctgttataaagagttttactgcatctgtagatcggaaattcatctctttgatgtcattaagctctgatggttgtatatatgaaaccttgataccaatacgtccagctgacccagaaaaaaatcagagcttagttaaatcactgctgctcaaggctgttgtatctggtaacgctcgaaatggagttgcactcactgccctggatcaggatcacgtcgcagtcctaggaagtccactagcagcttctaaggaatgcctctctgtatggaacataaaatttcaaacactacagacttcaaaagagttaccacaagggaccagtggtcaactctggtattatggagaacatttgtttatgctacatggaaaatctctaactgtgattccatacaagtgtgaagtgtcatcattagcaggtgctcttggaaaactcaagcatagtcaagatccaggaactcatgtcgtgtcccattttgtaaactgggagacacctcaaggatgtggacttgggttccagaactcagagcagtcaagaagaattttaaggagacgaaaaattgaagtgagtttacagccagaggttccaccatccaaacaacttttgtcaaccataatgaaagattcagaaaaacacattgaagtagaagtacggaaatttttggctctgaagcagacacctgactttcatactgtcattggggacacagtaacaggacttctggaaaggtgtaaagcagaaccatcattttatccccggaactgtctgatgcagcttatccaaacgcatgtgctttcttacagtttgtgccccgacttaatggagattgccttaaaaaagaaagatgtacagttgttacaactctgtctacagcagttccctgacattcctgaatcagtcacctgtgcttgcttaaaaattttcttgagcattggtgatgacagtcttcaagaaacagatgttaatatggagtcagtttttgactatagtataaattctgtacatgatgagaaaatggaagagcaaactgaaattcttcaaaatggcttcaatcctgaagaagataaatgcaataactgtgatcaagagttaaataaaaagccccaggacgaaacaaaggagagcacttcatgccctgtggtacaaaaaagagcagctctacttaatgcaattcttcattcagcatatagcgagacatttcttctgcctcatttgaaagacatcccagcacagcatatcacgctgtttcttaagtatttgtatttcctgtacctgaagtgtagcgaaaatgctactatgactcttcctggaatacacccacctaccttgaaccagattatggattggatatgtctacttctggatgcaaattttactgttgttgtaatgatgccagaagcaaagaggctactgataaatctttacaagcttgtaaaatctcagatatctgtttattctgagctcaacaagattgaagtaagttttcgggagctacagaaattaaatcaagaaaagaataatagaggattatattcaattgaagtgctggagctcttctgatattatcaattctccttcatagacattttataaagctcttttatgtgaactcttgcttcatccaggcaagaacggtgttttgtttgcgaccatctcagtgtcaagagaaacgtgtcagtgagtacctggaccatcacttaactgatgctccggggtaggactgcaggtttcacatgaacctgttctaggctgtggacattggtgtggagaggttctgcaattttttaaaaatatgtaactgggttgattttaagtaaaattatttgtgtattgataaaagtctaatttcttatcatgtgttttgaattttttcttttaataaaaaatgaccattgaagcagtgaaaaaaaaaaaaaa

SEQ ID NO: 129 - DNA, 795 bp, Homo sapiens
  CDS (199)..(525)
  misc_feature (1)...(795): n = a,t,c or g
gaggcatggccagccacccgttcccaggcgtccgggccgtttgaccagaattacccatgtggtgattaccaacgcgggcgcgaacgggcagataggtccggctgctctgaaggcggtgtatgacatggcccgcaagggtgcccgtgatgaaattcagacacagatgcgtgatggtggcctgttctccggaggtggacgatgaagaccttccgctggaaagtgaaacccggtatggatgtggcttcggtcccttctgtaagaaaggtgcgctttggtgatggctattctcagcgagcgcctgccgggctgaatgccaacctgaaaacgtacagcgtgacgctttctgtcccccgtgaggaggccacggtactggagtcgtttctggaagagcacgggggctggaaatcctttctgtggacgccgccttatgagtggcggcagataaaggtgacctgcgcaaaatggtcgtcgcgggtcagtatgctgcgtgttgagttcagcgcagagtttgaacaggtggtgaactgatgcaggatatccggcaggaaacactgaatgaatgcacccgtgcggagcagtcggccagcgtggtgctctgggaaatcgacctgacagaggtcggtggagaacgttattttttctgtaatgagcagaacgaaaaaggtgagccggtcacctggcaggggcgacagtatcagccgtatcccattcaggggagcggttttgaactgaatggcaaaggcaccagtacgcgccccncgctgncggtgtcctcaagcggtccttttcaccgcg

SEQ ID NO: 130 - DNA, 767 bp, Homo sapiens
  CDS (289)..(669)
gcacgaggtcgtgaaagggccgcaaaaaggccgaggcggagttgacggctgcgactccattttgtaggccgcttatttgtgtgcatccacggcgattcttcccgcagagttgtgaagcgaaaggcttacaattaaaaggaagaaaaaaaaataaagataattcgggagtacaattgacaaagcgtgtgggtcgctcagcctccagcagtaactgctgatctccagttcttggagggttccggtgagaagaacgcccctactgcggtactgaggaagcggcaggaggagatgcggcccctggacatagacgaggtggaagcgcctgaggaagtggaggtgctggagcccgaggaggatttcgagcagttcctgctcccggtcatcaacgagatgcgcgaggacatcgcgtctcttatacgcgagcacgggcgggcgtacctgcggaccaggagcaagctgtgggagatggacaatatgcttatccagatcaaaacgcaggtggaggcctcggaggagagcgccctcaatcacgtgcagcacccgagtggcgaagccgacgagagagtgtcggagttgtgcgagaaggctgaggagaaagccaaggagattgcgaagatggcagagatgctggtcgagctcgtctggcgaatagagagaagcgagtcttcttgaaggaggagatccggtggtaaggtcggaaactagctggagcttggatgaaactcagtagtcggcctaagcatgggttaaacccggcctgtaaaagt

SEQ ID NO: 131 - DNA, 841 bp, Homo sapiens
  CDS (111)..(506)
ggcagcggccgtggcaggctggctgggtaccggctgtcgctgacccaggagaagctgcctgtctacatcagcctgggctgcagcgcgctgccgccgcggggccggcagccatggccaaggacatcctgggtgaagcagggctacactttgatgaactgaacaagctgagggtgttggacccagaggttacccagcagaccatagagctgaaggaagagtgcaaagactttgtggacaaaattggccagtttcagaaaatagttggtggtttaattgagcttgttgatcaacttgcaaaagaagcagaaaatgaaaagatgaaggccatcggtgctcggaacttgctcaaatctatagcaaagcagagagaagctcaacagcagcaacttcaagccctaatagcagaaaagaaaatgcagctagaaaggtatcgggttgaatatgaagctttgtgtaaagtagaagcagaacaaaatgaatttattgaccaatttatttttcagaaatgaactgaaaatttcgcttttatagtaggaaggcaaaacaaaaaaaagcctctcaaaaccaaaaaaacctctgtagcattccagcggcttgaccaatgacctatgtcacaagaggtggcgtgtaaggaatgcagccccctgaagacagcactacaagtctgggggagccagttttaacatcagtgcacagctgctgctggtggccctgcagtgtacgttctcacctcttatgcttagttggaactaagcagtttgtaaactttcatccttttttttgtaaattcacaaagctttggaaggagaagcaataaatttttgttttcaaaaaaaaaaaa

SEQ ID NO: 132 - DNA, 1011 bp, Homo sapiens
  CDS (44)..(760)
gcgctgcggcacagctggtttgagcaactgaactggaaacaagatgcaggaccccaacgcagacactgaatggaatgacatcttacgcaaaaagggtatcttaccccccaaggaaagtctgaaagaattggaagaggaggcagaagaggagcagcgcatcctccagcagtcagtggtgaaaacatatgaagatatgactttggaagagctggaggatcatgaagacgagtttaatgaggaggatgaacgtgctattgaaatgtacagacggcggagactggctgagtggaaagcaactaaactgaagaataaatttggagaagttttggagatctcagggaaggattatgttcaagaagttaccaaagctggcgagggcttgtgggtcatcttgcacctttacaaacaaggaattcccctctgtgccctgataaatcagcacctcagtggacttgccaggaagtttcctgatgtcaaatttatcaaagccatttcaacaacctgcatacccaattatcctgataggaatctgcccacgatatttgtttacctggaaggagatatcaaggctcagtttattggtcctctggtgtttggcggcatgaacctgacaagagatgagttggaatggaaactgtctgaatctggagcaattatgacagacctggaggaaaaccctaagaagccgattgaagacgtgttgctgtcctcagtgcggcgctctgtcctcatgaagagggacagcgattccgagggtgactgaggctacagcttctatcacatgccgaactttcttgtgacaaattgtctggattttttaaaaaaggaaaaagcaagaatgaatccttgtggtttttagttttgtataaattatgtttcaaatctttacattttggaaataatcattgctggagattctgttaaatattttggaactctttttttttttaaattatagtatttcctctaaaaaaaattaaaaccagccatttgtatggcaaaaaaaaaaaa

SEQ ID NO: 133 - DNA, 547 bp, Homo sapiens
  CDS (170)..(373)
atgaggcactcgactgcttcgtttatgcgctggcggcgctgcgcatcagtatttcccgctggcagctggatctcagtgcgctgctggcgagcctgcaggaagaggatggtgcagcaaccaacaagaaaacactggcagattacgcccgtgccttatccggagaggatgaatgacgcgacaggaagaacttgccgctgcccgtgcggcactgcatgacctgatgacaggtaaacgggtggcaacagtacagaaagacggacgaagggtggagtttacggccacttccgtgtctgacctgaaaaaatatattgcagagctggaagtgcagaccggcatgacacagcgacgcaggggacctgcaggattttatgtatgaaaacgcccaccattcccacccttctggggccggacggcatgacatcgctgcgcgaatatgccggttatcacggcggtggcagcggatttggagggcagttgcggtcgtggaacccaccgagtgaaagtgtggatgcagccctgttgcccaactttacccgtggcaatggcc

SEQ ID NO: 134 - DNA, 481 bp, Homo sapiens
  CDS (222)..(338)
accatcgtggctcgctgcaacctccgcctcccaggagaattgcttgaaccctggaggcggaggttgccgtgagctaacattgcgcccctacactccagcctgccaacagagcaagactccgtctcaaaaataaaaaaaggatctacttttgagaatactgtcattggttgataaaatacagcagaaacttgtgaagaagctattttccatattcacctggcatgtttggagatgattgccatcaactttgtgactgtgaaggagaaaccttctgccacccaaaaactgaaaaatgcctctgcccccgtgggagaactggagccagatgtgatgctggttagtctcctgtattgggcgttcagcatggatgttgcctttttctgacctcaagacaactatccaactttccctgtgtccttcacgatgcaaccactaaagctctactgaagtctctaattctgagaaggcaccttaaaaattt

SEQ ID NO: 135 - DNA, 553 bp, Homo sapiens
  CDS (180)..(545)
ttcggcacgagggaactggtgctccacagaggtgggcccggtggtttggtccggcctggcctactggaccagcctgtgctcggtcggccacggctctgctgggctcctggcgccgcctcctcccagcccgccgcgggctgcgcgcttctgtgggtgggggaaggcaggactgactcagaatgacaacggcaacacgacaagaagtccttggcctctaccgcagcattttcaggcttgcgaggaaatggcaggcgacatcagggcagatggaagacaccatcaaagaaaaacagtacatactaaatgaagccagaacgctgttccggaaaaacaaaaatctcacggacacagacctaattaaacagtgtatagatgaatgcacagccaggattgaaattggactgcattacaagattccttacccaaggccaattcatctgcctccaatgggccttaccccactccgaggccggggacttcgaagccaagagaaactgaggaaactttccaaaccagtatatctcagatctcatgatgaagtttcctaatctag

SEQ ID NO: 136 - DNA, 1067 bp, Homo sapiens
  CDS (25)..(1029)
gcacgaggatcccgcagcaaactcatggcaccgccccgaatcgggacgcacaatggcaccttccactgcgacgaggcactggcatgcgcactgcttcgcctcctgccggagtaccgggatgcagagattgtgcggacccgggatcccgaaaaactcgcttcctgtgacatcgtggtggacgtggggggcgagtaccaccctcggagacaccgatatgaccatcaccagaggtctttcacagagaccatgagctccctgtcccctgggaagccgtggcagaccaagctgagcagtgcgggactcatctatctgcacttcgggcacaagctgctggcccagttgctgggcactagtgaagaggacagcatggtgggcaccctctatgacaagatgtatgagaactttgtggaggaggtggatgctgtggacaatgggatctcccagtgggcagagggggagcctcgatatgcactgaccactaccctgagtgcacgagttgctcgacttaatcctacctggaaccaccccgaccaagacactgaggcagggttcaagcgtgcaatggatctggttcaagaggagtttctgcagagattagatttctaccaacacagctggctgccagcccgggccttggtggaagaggcccttgcccagcgattccaggtggacccaagtggagagattgtggaactggcgaaaggtgcatgtccctggaaggagcatctctaccacctggaatctgggctgtcccctccagtggccatcttctttgttatctacactgaccaggctggacagtggcgaatacagtgtgtgcccaaggagccccactcattccaaagccggctgcccctgccagagccatggcggggtcttcgggacgaggccctggaccaggtcagtgggatccctggctgcatcttcgtccatgcaagcggcttcattggcggtcaccgcacccgagagggtgccttgagcatggcccgtgccaccttggcccagcgctcatacctcccacaaatctcctagtctaataaaaccttccatctcataaaaaaaaaaaa

SEQ ID NO: 137 - DNA, 7072 bp, Homo sapiens
  CDS (375)..(1652)
accagaatgcaaaggtgggcagcgaagccatccaggtgctccccgccttcccccgcgaggtccaacgcctgcccgagcctgccaagtcctgccgccagcggcagctggaagccagaaaggcagcagccgagaagaagaagattcagaaggagaagctgagcactccggagaagatcaagcaggaggccctggagctggcgggcattacgtcggacccaggcctgtctttgaagggtggattgtcccagcaaggcctgaagccctccctcaaggtggagccgcagaaccacttcagctccttcaagtacagcggcaacgcggtggtggagagctactcggtgctgggcaactgccggccctccgacccttacagcatgaacagcgtgtactcctaccactcctactatgcacagcccagcctgacctccgtcaatggcttccactccaagtacgctctcccgtcttttagctactgtggctttccatccagcaaccccgtcttcccctctcagttcctgggtcctggtgcctgggggcacagtggcagcagtggcagttttgagaagaagccagacctccacgctctgcacaacagcctgagcccggcctacggtggtgctgagtttgccgagctgcccagccaggctgttcccacagacgcccaccaccccactcctcaccaccagcagcctgcgtacccaggccccaaggagtatctgcttcccaaggcccccctactccactcagtgtccagggacccctccccctttgcccagagctccaactgctacaacagatccatcaagcaagagccagtagacccgctgacccaggctgagcctgtgcccagagacgctggcaagatgggcaagacacctctgtccgaggtgtctcagaatggaggacccagtcacctttggggacagtactcaggaggcccaagcatgtcccccaagaggactaacggtgtgggtggcagctggggtgtgttctcgtctggggagagtcctgccatcgtccctgacaagctcagttcctttggggccagctgcctggccccttcccacttcacagatggccagtgggggctgttccccggtgaggggcagcaggcagcttcccactctggaggacggctgcgaggcaaaccgtggagcccctgcaagtttgggaacagcacctcggccttggctgggcccagcctgactgagaagccgtgggcgctgggggcaggggatttcaactcggccctgaaaggtagtcctgggttccaagacaagctgtggaaccccatgaaaggagaggagggcaggattccagccgcaggggccagccagctggtcttctaccagcacaagaacctcaaccagcccaaccacgggctggccctctgggaagccaagatgaagcagctggcggagagggcacgggcacggcaggaggaggctgcccggctgggcctgggccagcaggaggccaagctctacgggaagaagcgcaagtgggggggcactgtggttgctgagccccagcagaaagagaagaagggggtcgtccccacccggcaggcactggctgtgcccacagactcggcggtcaccgtgtcctcctatgcctacacgaaggtcactggcccctacagccgctggatctaggtgccagggagccagcgtacctcagcgtcgggcctggcccgagctgtctctgtggtgcttttgccctcatacctgggggcgggttgggggtgcagaagtctttttatctctatatacatatatagatgcgcatatcatatatatgtatttatggtccaaacctcagaactgacccgcccctcccttacccccacttccccagcactttgaagaagaaactacggctgtcgggtgatttttccgtgatcttaatatttatatctccaagttgtccccccccttgtctggggggtttttatttttattttctctttgtttttaaaactctatccttgtatatcacaataatggaaagaaagtttatagtatcctttcacaaaggagtagttttaaattccatttaaaatgtgtatttattggattttttaaaagcgacaatagtaatggtaaaggatgggcaggaaaggccagtagtgctcccccgcccagtctcgctgggtctggcgagccaagcccctcgggcgctggcgaggtcctcagccatctgcccctcgagagccaagcgcggacggtagccacccagttcatccctcccgacatacaccccttccctttggggaagggagcctcaggacagcttctgtcctctctgataggatgggagagtctgcagaaaaccatctggggtcccttttccagtccccggcttggagtcgaagggcagatgcaccccaggccagccccacgagatgctggcatagctttccccagaaaccaggttggaagtagatggcttcaagcttgctagtctccacactgaatcctctgtccgttatttatggagtcacacgatgtcatggttcactaggcagcacctcacgctggagctggagtgcgaggttcttaggggccgtgcccaccatgttgccaagccaatgcatgctgagctgaaggaatttgtcttagtggcagttttttaaaaaatgcccccaaagtctatgctgatactgaaaaagggctactgtatctttaaaaacaggaagttgaacccaagctgtgaaaagccagtggtgctctgtgcatggtgctgtgcggagcctggtgctgtagtgttgtgctgggactttcttgactcttgggcaggtcacatcctacaggagctcagcagaccagtgtaacaacagttaatgcatctatcctgatccctgaatttccacattggacaatggtgcatgcctcacacctgagcctgcttcctccatgctgtcattgggttcgggggcctacacttaacaattttaaagtgcaagagtcaaacattttcaacaggttgctataattttcctccctaattggtgccatttctccatttgatcattttctttttttcctttctcccctcttcatccactttaatatagctgttctgaaattctggtgcattcattcggttctttgaaatgagaatgtggtgcttaatttttgtgacgttgtcgagagaggttgggcctgatgggagcaacactcatcatcaccaagtcaaactttgttggagtgttggtttttcttgtgatattagcagaaatgatctcatgctagccatgtggatgtgtgtgtggtgaatggggggcttcatcaggacacacagaggggaatgtggccacacggtggatgaccaccaagccctgagatgaacaggtatttactgagcagttgtattcagatatgggtcttcatgaatcatgtttaacaatcagatgaccgctataggcaagttcctgagcttccgggtgccttgagtaagagctgagaaccggcctgctgggtgtttactgtatctgtttggaagcactggcggagggtcgttgtaagatgtcctgagcatttatgtggtctggttttaactgtaaatagtgaaagatttttttaagcacttttgcctagatttaaacagcaacttgaaaaaaaaagtatgttttaacatgtaattgtgggagaaattgtaaatagtagccgaatatttaatgtgctttgtctatcctccacttttaccatattctgtaaagttgcatttattttacaggacaaaaaaatgaaatattattgcttttgaaataaatacccaagagcttatcaggacttagaattattcagaactcagatttataggaaaacctctgaccttcagtttgacaagctaaaggaagcagagtctttaatgagcatgctaattttctagttttgaggaaaaattgggtcctttaaatgctattttgcttatcgcatcagtacttttatgcaggtctcatttgactccgtgcttaggtagatgcgggggtgccttgaaaacttcattttaaatgatcttaagcaagaaatacaatattttacgaaacatttggagaatgtgaccgtctgtatgacccgtggaagccccaggttggctgttggtttggaaggtcccgagtgtaacccaggtgattctgatacttggcatgtgtgaatcttcctgatgtatgttaaataaactcttcccctcatcaccctttggtaggaaagccattagatgaaaggagaaaccaatacaagctaaaagcatgcgacgtctgtcccccagcccaaacagccttggttcatcagtttctgcagtaggagataggctgctgagaggtgagtcaagaggcagtctccattggatgtccccactccccgcagaatggcgtttccagagttaggcggtgtggttgccgtgctcaagcccatgctgatttgtacactacatgtctaacctacctcaaatctcagtcattaaaattagcatgctttagacatatatttaaaaagtaactatgcacagctctttatcccccccttgctgctgaagctttcttaaagagaaaaatcaaatttttattttttactggcactatcattttttaagtcctaaagatgattaacagacatttttatcatgagaagaaaaataaagccattgcaactaaagaacctaacagcatgaccaagttcgaagagtcatattatagcaacggaaatcgatggcgtcttagtcatctccccagtgtgccctgtccacggacaccatccacgtgcagtgcaaacatttggttccttttctgctctgttttgttttccctgcctgttgcgtgcaagggaagtgcttgtaaagttctgtgctacgagatttttaaaataaaaatcgcttcgcagcaggttctcacaaaataactggtgctagctcaagaaatcatcatctgaccatcagaaatcttgactaaaggtgttgcatggatttgggggtctttcggtttttggttttgggtctggcttttagcagggccaatgtttcccacaccccggcttcatgggtactgctttgccttctcaccaaggtgacgatggtgtgcgtggaaagagatgataccccaccgccccctcttggtccttccaccagcctcttttgggaacagtagtttgcagagcaagggatttttaaagcgctaaaggaaagaagtagcagagcttaactgctttgtaccacacagcagtagatgtgcaaggacggttgacaatgagtcgatgataacctaatttcattgagagaaacccagccagacttgcttctagaggtttaatcaccatgagatctcaaaccaaggcaaagctggtggaaaactatatgatatccctgacgtgcctcaaccagtatctctttccttttgttactgaagtgtgttttatggactaggaagcatttttatgaattgaaatagtctaaataaaatggtgctatggtgttttaatgtgactgtccctgatcctgtcttgctgaggtgctatcaacgttctgaaaccacaaccaaccaaaaacaaggtgggctccagtctcttggctttttttttttttccctcccctcttttggtgctgtcttagacccgtttaccgtgctataatctgctctgagcagtgttgtgttgtgttgtattgttcttcccttggtggccaaacaaagcaagtcgagaaggcagctatctccctttctgtgatcgggagtgggcctgcctggcttggcaggtgctttttggttccacacctgtcttctcaggcttgatgtgaaagaaagggcgaagggttttttgagtttttgtttttgaggaaggggagttgggtacttctgcctctcctagcatgataggcattctcatagccagggacagattttctcctgcagcccagggtgctaagcagacatctctgggagtcccaagggcacaccaagggagaccagatggatctccttcctcccctggcactggctgggaccatggtgggcaggggcttcattctctgacccagcgttgcttctgcctctcattggtaaccccttatgttcggactaaaggaaggagctttctttgctcactcgatgccactgaggctgctttttagttggtgctaacctaaatttcttcttgggtccacagaagttgatgttttaaaaactcaccaggaagctccattttgtgtcatccactgtcacaataatttttttaaatacctcaaaaacaggacatcatgacaacttcagtaaagtagattccatgagggtctgatacctgcaggttgtccgtctgatgacatacttgaccttgaaaaatctggggtcattttgtttttcattcttcagcagttaagatagcggaacgccgaaaggaaggagcgtagttggctgtatttcatgtttaagttttgcttttgaataaaatgtgaatttcctatgcccatctcattgagctttctcagtcattgttgctgtcatttgaaatgactccctcaaaacctagttttattagccagctgcctctgctgtagtacatggccaacttcaacataccctggaccaaaacatttttgaggtgcatacccccaacataagttacacagtcccacatccaggtgcacagagtgcgagtgcactccgcgagtgcggggggaggggcggccccctctggtgctcccagcccttcctcctgcagagctgcaggcaagagcagagcaataggcttctcccctgagcagagaccgcagcacagaaatgcaaggtctaaagttgctttttgcctaagaatcagcgagcgatttggcctacttcctcattggcttctattctgatatcagggatgctttttgtagtggtattgtttgctccctcttcgcgttttgactacccgtcattcaggggtaactcatcactcttcacacggggatttaaattaagaaactaattggctcatgtgaacattccaaattttcttggtttcaataccctttttttttcttttgaggggaaaagaggggagaaaaacaggagtgatgtcatttctttttcatgtattcc

SEQ ID NO: 138 - DNA, 859 bp, Homo sapiens
  CDS (87)..(737)
ggctgctcctcggggcggcgaccgggctcacgcgcgggcccgccgcggccttcaccgccgcgcgctctgacgccggcataagggccatgtgttctgaaattattttgaggcaagaagttttgaaagatggtttccacagagaccttttaatcaaagtgaagtttggggaaagcattgaggacttgcacacctgccgtctcttaattaaacaggacattcctgcaggactttatgtggatccgtatgagttggcttcattacgagagagaaacataacagaggcagtgatggtttcagaaaattttgatatagaggcccctaactatttgtccaaggagtctgaagttctcatttatgccagacgagattcacagtgcattgactgttttcaagcctttttgcctgtgcactgccgctatcatcggccgcacagtgaagatggagaagcctcgattgtggtcaataacccagatttgttgatgttttgtgaccaagagttcccgattttgaaatgctgggctcactcagaagtggcagccccttgtgctttggagaatgaggatatctgccaatggaacaagatgaagtataaatcagtatataagaatgtgattctacaagttccagtgggactgactgtacatacctctctagtatgttctgtgactctgctcattacaatcctgtgctctacattgatccttgtagcagttttcaaatatggccatttttccctataagttttatgtagttaaatgcttcctagaaacctaaataagatctattaatttctgacgagaggtgttcttctagaattaattacttttatcttttgtcttcatttgtggccaaaatacga

SEQ ID NO: 139 - DNA, 1706 bp, Homo sapiens
  CDS (920)..(1246)
tcctctatataaatgcgtaggggttttagttaaatgtcctttgaagtatacttgaggagggtgacgggcggtgtgtacccccttcagggccctgttcaactaagcactctactcttagtttactggtaaatccaccttcgacccttaagtttcataagggctatcgtagttttctggggtagaaaatgtagcccatttcttgccacctcatgggctacaccttgacctaacgtctttacgtgggtacttgcgcttactttgtagccttcatcagggtttgctgaagatggcggtatataggctgagcaagaggtggtgaggttgatcggggtttatcgattacagaacaggctcctctagagggatatgaagcaccgccaggtcctttgagttttaagctgtggctcgtagtgttctggcgagcagttttgttgatttaactgttgaggtttagggctaagcatagtggggtatctaatcccagtttgggtcttagctattgtgtgttcagatatgttaaagccactttcgtagtctattttgtgtcaactggagttttttacaactcaggtgagttttagctttattggggagggggtgatctaaaacactctttacgccggcttctattgacttgggttaatcgtgtgaccgcggtggctggcacgaaattgaccaaccctggggttagtatagcttagttaaactttcgtttattgctaaaggttaatcactgctgtttcccgtgggggtgtggctaggctaagcgttttgagctgcattgctgcgtgcttgatgcttgtcccttttgatcgtggtgatttagagggtgaactcactggaatggggatgcttgcatgtgtaatcttactaagagctaatagaaaggctaggaccaaaccagaaacctccaattctcatgtggaagcccatgccctcaccctccaacatgaaagcctctgcagcacttctgtgtctgctgctcacagcagctgctttcagcccccaggggcttgctcagccagttgggattaatacttcaactacctgctgctacagatttatcaataagaaaatccctaagcagaggctggagagctacagaaggaccaccagtagccactgtccccgggaagctgtaatcttcaagaccaaactggacaaggagatctgtgctgaccccacacagaagtgggtccaggactttatgaagcacctggacaagaaaacccaaactccaaagctttgaacattcatgactgaactgaaaacaagccatgacttgagaaacaaataatttgtataccctgtcctttctcagagtggttctgagattattttaatctaattctaaggaatatgagctttatgtaataatgtgaatcatggtttttcttagtagattttaaaagttattaatattttaatttaatcttccatggattttggtgggttttgaacataaagccttggatgtatatgtcatctcagtgctgtaaaaactgtgggatgctcctcccttctctacctcatgggggtattgtataagtccttgcaagaatcagtgcaaagatttgctttaattgttaagatatgatgtccctatggaagcatattgttattatataattacatatttgcatatgtatgactcccaaattttcacataaaatagatttttgtataacaaaaacaaaaaaaaaaaa

SEQ ID NO: 140 - DNA, 946 bp, Homo sapiens
  CDS (172)..(789)
ctccgccccatccccaggggccgcctcccccggggcggcctccaggctgccgagacctataaaggcgccaggttttctcaatgaagccgggacgcactccggagcgcactgcgtggtcgcaccctacccgggctgccttggaagtcgtccccgccgcccctccgcaccggcatgaagctcatcgtgggcatcggaggcatgaccaacggcggcaagaccacgctgaccaacagcctgctcagagccctgcccaactgctgcgtgatccatcaggatgacttcttcaagccccaagaccaaatagcagttggggaagacggcttcaaacagtgggacgtgctggagtctctggacatggaggccatgctggacaccgtgcaggcctggctgagcagcccgcagaagtttgcccgtgcccacggggtcagcgtccagccagaggcctcggacacccacatcctccttctggaaggcttcctgctctacagctacaatacccgcaactacacagtccctgatccccccggcctcttcgatggccacgtgtggcccatgtaccagaagtataggcaggagatggaggccaacggtgtggaagtggtctacctggacggcatgaagtcccgagaggagctcttccgtgaagtcctggaagacattcagaactcgctgctgaaccgctcccaggaatcagccccctccccggctcgcccagccaggacacagggacccggacgcggatgcggccacagaacggccaggcctgcagcgtcccagcaggacagcatgtgagcgtttccctatgggggtgtctgtacgtaggagagtggaggccccactcccagttgggcgtcccggagctcagggactgagccccaagacgcctctgtaacctcgctgcagcttcagtagtaaactgggtcctgtttttttaaaaaaaaaaaaa

SEQ ID NO: 141 - DNA, 750 bp, Homo sapiens
  CDS (48)..(626)
agcgctccgggcctggaatccctacgcgtccctttgggtttagcacgatgagctcaatcggcactgggtatgacctgtcagcctctacattctctcctgacggaagagtttttcaagttgaatatgctatgaaggctgtggaaaatagtagtacagctattggaatcagatgcaaagatggtgttgtctttggggtagaaaaattagtcctttctaaactttatgaagaaggttccaacaaaagactttttaatgttgatcggcatgttggaatggcagtagcaggtttgttggcagatgctcgttctttagcagacatagcaagagaagaagcttccaacttcagatctaactttggctacaacattccactaaaacatcttgcagacagagtggccatgtatgtgcatgcatatacactctacagtgctgttagaccttttggctgcagaatttacatagtacatgacgaagttaaggataaagcttttgaactagaactcagctgggttggtgaattaactaatggaagacatgaaattgttccaaaagatataagagaagaagcagagaaatatgctaaggaatctctgaaggaagaagatgaatcagatgatgataatatgtaacatttactccagcatctattgtattttaaatttctactccagtccaatgtaactatttagccctggattatacatactgtccaattttcattaaatttttgtcttataaaaaaaaaaaaaa

SEQ ID NO: 142 - DNA, 2539 bp, Homo sapiens
  CDS (314)..(2482)
tctcgacgccgagacactgctggtggtactcgatgtagatcacgtggatggcaggagcagtggcaaaggactttcaactgacagacaagcatgagatggtggtcagctacctcccactcagccatattgcagcacagatgatggacatctgggtacccataaagattggggcgctcacatactttgctcaagcagatgctctcaaggggtgactggcaaccatgccgtggagacactcaagcaattctgtggagaaggccatggaatgaggagctgagacttcctgccaacaaccagtcatctagacctgagcatgcagaattccgagggtggagcggattcgccagcgtccgtggctctgcgtccctcggcggcagccccgcctgtgccagcctccccgcagagggtgttggtccaggcagccagctccaatcccaaaggggcccagatgcagccgatctccctccccagagttcagcaggtaccccagcaggtgcagccggtgcagcacgtgtatcctgcccaggtgcagtacgtggaagggggagacgccgtctacaccaatggagccatacgaacagcctacacctacaaccccgagcctcagatgtacgcccccagcagcacggcttcttacttcgaggccccaggcggtgcccaggtgaccgtggcagcctcgtccccgccagcggtcccctcccacagcatggtgggcatcaccatggatgtcggggggagccccatcgtctccagcgcgggagcctatctcatccacggggggatggacagcaccagacactccctggcccacacctcccgctcatcgcccgccacgcttgaaatggcgattgaaaacctccaaaaaagcgaaggaatcacatcacacaaaagcggtttactcaacagccatctccagtggctgttggataattatgaaacagcggaaggtgtgagtctccccagaagttctctttacaaccactaccttcggcactgccaggagcacaagctagacccagtgaacgccgcctccttcgggaaactgatccgttctgtgtttatggggctgagaacgcggcggctgggcaccaggggcaactcgaagtaccattactatgggattcgtctgaagccggactcaccactgaaccggctgcaggaggacacgcagtacatggccatgcggcagcagcccatgcaccagaagcccaggtaccggccagcccagaagacggacagcctcggggacagcggctcccacagcggcctgcacagcactccggaacagaccatggccgtgcagagccagcaccaccagcagtacatagatgtctcccacgtcttccccgagttcccagcgcccgacctgggcagcttcctgctgcaggacggcgtcacactgcacgacgtcaaggccctgcagctggtgtacagacggcactgcgaggcaactgtagatgtggtgatgaacctccagttccactacatcgagaagctgtggctctccttctggaactctaaggcctcctccagcgacggccccacctctcttcctgccagtgacgaagaccccgagggcgccgtcctgcccaaggacaagcttatctccctgtgtcagtgcgaccccatcctcaggtggatgaggagctgcgaccacatcctctaccaggcgctggtggagattctcatccccgacgtgctgaggccggtccccagtaccttgacacaggccatccgtaactttgccaagagcttggaaggctggttgacaaatgccatgagtgacttcccacaacaggtcatccagaccaaggtgggcgtcgtcagtgccttcgcccagacgctgcggcgctacacgtccctcaaccacctggcgcaggcggcccgggcggtgctgcagaacacgtcccagatcaaccagatgctcagcgacctcaaccgcgtggactttgccaacgtgcaggagcaggcctcgtgggtgtgccagtgcgaggagagtgtggtgcagcggctggagcaggatttcaagctgaccctgcagcagcagagctccctggaccagtgggccagctggctggacagtgtggtcacccaggtcctgaagcagcatgccggcagccccagcttccccaaggccgcccggcagttcttgctgaaatggtccttttacagctccatggtgatccgggacctgaccctgcgcagcgctgccagcttcggctccttccacctcatccgcctgctctacgacgagtacatgttctacctggtggagcaccgcgtcgcggaggccaccggagagacgccgatcgctgtgatgggagagttcaacgatctcgcctctctgtcgctgacgctgctcgacaaagatgacatgggcgatgagcagcgtggcagcgaggcgggcccagacgcccgcagcctgggtgagcccctggtaaagcgggagcgcagtgaccccaaccactccctgcagggcatctagcagccccggccggcgcctcctcgaggttccaaaagatgccgcctggtcactctg

SEQ ID NO: 143 - DNA, 3321 bp, Homo sapiens
  CDS (568)..(2742)
attattggaacgacgacttcgtgcagaagcaggaggatggtggttgtgggtcctctgtgttcagccctgttaacctttaaaccagcacggccgccgcagctgtgagcctagcacctgatcagtggagagctgtggattgcatgtttgtttgccattgcccccgccaccctgcaagttgcaccttctagaatcagcaagccaagctcctctcacccagcgtaatgatgcggaaatgcaaatgcaccatcatgttgtgacccatattgcgaaaattagaaaaaaggaagttgtgtttcgctattgcacgaagttcagcccagaggagaaactcgctcgccttcagaagacagtacctcctaaatggctctactttgaacctgctgggcaaggaagagattttcaaggaaaccatctaccgtgtgcaagctcctgccggccaaccccagaccccagcacggagccaggcgcctgtgcccgccgaccctcagcatcctcctcagaaaggctggtggcatcaggaagcccctggccagcctccacctgagcccagtgagctcagctttaaggatggagtcaggcagggggtcctcaacccctccaggacccattgctgccctagggatgccagacactgggcctggcagttcctccctagggaagcttcaggcgctccctgttgggcccagagcccactgtggggaccctgtcagcctggctgcagcaggggacggctctccagacataggccccacgggagagctgagtggtagcttaaagatccccaaccgggacagcgggatcgacagtccctcctccagtgtggctggagagaactttccctgcgaggagggcttggaggctggcccaagccccactgtactgggggcgcacgcagagatggccctggacagccaggtcccgaaggtcaccccccaggaggaggcggacagcgacgtgggtgaggaacctgactctgagaacaccccccagaaggctgacaaggatgccggcctggcccagcactctggcccccagaagcttctccacattgcccaggagctcctgcacaccgaggagacctatgtgaagcggctgcacctgctggaccaggttttctgcaccaggctgacggatgcggggatccctccagaagtcatcatgggcatattctctaacatctcctccatccaccgcttccacgggcagttcctgctgccggagctgaagacgcggatcacggaggagtgggacacaaacccacggctcggggacatcctgcagaagctggccccattcctgaagatgtacggcgagtatgtcaagaactttgaccgagccgtagggctggtgagcacgtggacccagcgctccccactgtttaaagacgtcgtccacagcatccagaagcaggaggtatgcgggaacctgacgctgcagcaccacatgctggagcccgtgcagagggtcccccggtacgagctgctgctcaaggactatctgaagaggctcccgcaggacgccccagaccggaaggatgcggagaggtccttggagctcatctccacagccgccaaccactccaatgctgccattcggaaagtggagaaaatgcacaagctcttggaggtgtacgagcagctgggtggggaagaagacattgtcaacccggccaatgaactgatcaaggagggccaaatccagaaactgtcagccaagaacggcaccccccaggaccgccacctcttcctgttcaacagcatgatcctttactgtgtgcccaagctgcggctcatgggccagaagttcagcgtccgggagaagatggacatctcaggcctccaggtgcaggatatcgtcaagccaaacacagcacatacattcatcataacgggaagaaaaaggtccctggagctgcagacgcggacagaggaagagaagaaagaatggattcagatcatccaggccaccatcgagaagcacaaacagaacagcgaaaccttcaaggcttttggtggcgccttcagccaggatgaggaccccagcctctctccagacatgcctatcacgagcaccagccctgtggagcctgtggtgaccaccgaaggcagttcgggtgcagcagggctcgagcccagaaaactatcctctaagaccagacgtgacaaggagaagcagagctgtaagagctgtggtgagaccttcaactccatcaccaagaggaggcatcactgcaagctgtgtggggcggtcatctgtgggaagtgctccgagttcaaggccgagaacagccggcagagccgtgtctgcagagattgtttcctgacacagccagtggcccctgagagcacagagaagacacccactgcagacccccagcccagcctgctctgcggccccctgcggctgtcagagagcggagagacctggagcgaggtgtgggccgccatccccatgtcagatccccaggtgctgcacctgcagggaggcagccaggacggccggctgccccgcaccatccctctccccagctgcaaactgagtgtgccggaccctgaggagaggctggactcggggcatgtgtggaagctgcagtgggccaagcagtcctggtacctgagcgcctcctccgcagagctgcagcagcagtggctggaaaccctaagcactgctgcccatggggacacggcccaggacagcccgggggccctgcagcttcaggtccctatgggcgcagctgctccgtgagctgagtctcccactgccctgcacaccaccacattggacctgtgctgtcctgggaggtggtgttggaggccccatgaagagcgccctggactgctgagggtgggccaacagcccagagctcaggacatttggctttggggggaaggaaactgaggcccagagaggggcaaccactggccaagggtcacccagcaagttttggctaagagcctggcctccagccccagcagtgtggcccagagcaggggccgactgccaaagtaaccatcatccatatgggccgtgtggtgatgctggcccggaaggcagaaagaggcagcatgggcactgccagggacagccacatcctgctggtctgcagcgtggtccaccccgcccctgcccagcctgtctacaccgtgtgagctgaatcgtgacttgcttcccacctcctttctctgtcctctcctgaggttctgcctgcagcccctaggaggtgggcctgccccatcctagctggactcatggttcctaaataaccacgctcagaagctctgctaggacttaccccagccactgagtggcaggcgcatgaga

SEQ ID NO: 144 - DNA, 2451 bp, Homo sapiens
  CDS (265)..(1938)
gactactgtactcccaggcagaaacccacggctgaagcccacgatgcccatgtgtaacttggttattacacacacgtttggagcccagtgtgcagacccgcagcgcagaggaggcggcggaacaccccgggttggtcgggtttccaagggctgacccgagctccagcactttttccgcgcctgatttttcagagctcttcagaaaccaggctgctttcaggaacattgctgtggattcccagggcctattccactagaagcaagatggctgaactcaatactcatgtgaatgtcaaggaaaagatctatgcagttagatcagttgttcccaacaaaagcaataatgaaatagtcctggtgctccaacagtttgattttaatgtggataaagccgtgcaagcctttgtggatggcagtgcaattcaagttctaaaagaatggaatatgacaggaaaaaagaagaacaataaaagaaaaagaagcaagtccaagcagcatcaaggcaacaaagatgctaaagacaaggtggagaggcctgaggcagggcccctgcagccgcagccaccacagattcaaaacggccccatgaatggctgcgagaaggacagctcgtccacagattctgctaacgaaaaaccagcccttatccctcgtgagaaaaagatctcgatacttgaggaaccttcaaaggcacttcgtggggtcacagaaggcaacagactactgcaacagaaactatccttagatgggaaccccaaacctatacatggaacaacagagaggtcagatggcctacagtggtcagctgagcagccttgtaacccaagcaagcctaaggcaaaaacatctcctgttaagtccaatacccctgcagctcatcttgaaataaagccagatgagttggcaaagaaaagaggcccaaatattgagaaatcagtgaaggatttgcaacgctgcaccgtttctctaactagatatcgcgtcatgattaaggaagaagtggatagttccgtgaagaagatcaaagctgcctttgctgaattacacaactgcatcattgacaaagaagtttcattaatggcagaaatggataaagttaaagaagaagccatggaaatcctgactgctcgtcagaagaaagcagaagaactaaagagactcactgaccttgccagtcagatggcagagatgcagctggccgaactcagggcagaaattaagcactttgtcagcgagcgtaaatatgacgaggagctcgggaaagctgcccggttttcctgtgacatcgaacagctgaaggcccaaatcatgctctgcggagaaattacacatccaaagaacaactattcctcaagaactccctgcagctccctgctgcctctgctgaatgcgcacgcagcaacctctgggaaacagagtaacttttcccgaaaatcatccactcacaataagccctctgaaggcaaagcggcaaaccccaaaatggtgagcagtctccccagcaccgccgacccctctcaccagaccatgccggccaacaagcagaatggatcttctaaccaaagacggagatttaatccacagtatcataacaacaggctaaatgggcctgccaagtcgcagggcagtgggaatgaagccgagccactgggaaagggcaacagccgccacgaacacagaagacagccgcacaacggcttccggcccaaaaacaaaggcggtgccaaaaatcaagaggcttccttggggatgaagacccccgaggccccggcccattctgaaaagccccggcgaaggcagcacgctgcagacacctcggaggccaggcccttccggggtagtgtcggtagggtttcacagtgcaatctctgccccacgagaatagaagtttccacagatgcagcagttctctcagtcccggctgtgacgttggtggcctgagctaggaggaaaaagagcagttttcactcagttttggttccctgcccgaggtgctgacccaattcgctgccaaaagagtgtcaatcagaatatacaaatcccgtatggttgtgtcatcctctcttaatcatttttactaattctaataatcagctctagcttgcttcataattttcatggctttgcttgatctgttgatgctttctctcatcaagactttgcagcattttagccaggcagtatttactcattattaggaaaatcaagatgtggctgaagatcagaggctcagttagcaacctgtgttgtagcagtgatgtcagtccattgattgtctttagagagttaatgttacaaaaaagaattcttaataatcagacaaacatgatctgctgaggacacatgcgcttttgtagaatttaacatctggtgtttttctgaaaaaatatatatacatatattgctttatttgaaacaaattaaaatatgctgcatttgaaaaaaaaaaaa

SEQ ID NO: 145 - DNA, 2244 bp, Homo sapiens
  CDS (265)..(1731)
gactactgtactcccaggcagaaacccacggctgaagcccacgatgcccatgtgtaacttggttattacacacacgtttggagcccagtgtgcagacccgcagcgcagaggaggcggcggaacaccccgggttggtcgggtttccaagggctgacccgagctccagcactttttccgcgcctgatttttcagagctcttcagaaaccaggctgctttcaggaacattgctgtggattcccagggcctattccactagaagcaagatggctgaactcaatactcatgtgaatgtcaaggaaaagatctatgcagttagatcagttgttcccaacaaaagcaataatgaaatagtcctggtgctccaacagtttgattttaatgtggataaagccgtgcaagcctttgtggatggcagtgcaattcaagttctaaaagaatggaatatgacaggaaaaaagaagaacaataaaagaaaaagaagcaagtccaagcagcatcaaggcaacaaagatgctaaagacaaggtggagaggcctgaggcagggcccctgcagccgcagccaccacagattcaaaacggccccatgaatggctgcgagaaggacagctcgtccacagattctgctaacgaaaaaccagcccttatccctcgtgagaaaaagatctcgatacttgaggaaccttcaaaggcacttcgtggggtcacaggcccaaatattgagaaatcagtgaaggatttgcaacgctgcaccgtttctctaactagatatcgcgtcatgattaaggaagaagtggatagttccgtgaagaagatcaaagctgcctttgctgaattacacaactgcatcattgacaaagaagtttcattaatggcagaaatggataaagttaaagaagaagccatggaaatcctgactgctcgtcagaagaaagcagaagaactaaagagactcactgaccttgccagtcagatggcagagatgcagctggccgaactcagggcagaaattaagcactttgtcagcgagcgtaaatatgacgaggagctcgggaaagctgcccggttttcctgtgacatcgaacagctgaaggcccaaatcatgctctgcggagaaattacacatccaaagaacaactattcctcaagaactccctgcagctccctgctgcctctgctgaatgcgcacgcagcaacctctgggaaacagagtaacttttcccgaaaatcatccactcacaataagccctctgaaggcaaagcggcaaaccccaaaatggtgagcagtctccccagcaccgccgacccctctcaccagaccatgccggccaacaagcagaatggatcttctaaccaaagacggagatttaatccacagtatcataacaacaggctaaatgggcctgccaagtcgcagggcagtgggaatgaagccgagccactgggaaagggcaacagccgccacgaacacagaagacagccgcacaacggcttccggcccaaaaacaaaggcggtgccaaaaatcaagaggcttccttggggatgaagacccccgaggccccggcccattctgaaaagccccggcgaaggcagcacgctgcagacacctcggaggccaggcccttccggggtagtgtcggtagggtttcacagtgcaatctctgccccacgagaatagaagtttccacagatgcagcagttctctcagtcccggctgtgacgttggtggcctgagctaggaggaaaaagagcagttttcactcagttttggttccctgcccgaggtgctgacccaattcgctgccaaaagagtgtcaatcagaatatacaaatcccgtatggttgtgtcatcctctcttaatcatttttactaattctaataatcagctctagcttgcttcataattttcatggctttgcttgatctgttgatgctttctctcatcaagactttgcagcattttagccaggcagtatttactcattattaggaaaatcaagatgtggctgaagatcagaggctcagttagcaacctgtgttgtagcagtgatgtcagtccattgattgtctttagagagttaatgttacaaaaaagaattcttaataatcagacaaacatgatctgctgaggacacatgcgcttttgtagaatttaacatctggtgtttttctgaaaaaatatatatacatatattgctttatttgaaacaaattaaaatatgctgcatttgaaaaaaaaaaaa

SEQ ID NO: 146 - DNA, 711 bp, Homo sapiens
  CDS (245)..(589)
tgaagggaggtagtaaccaaggttccgtggctcctgagacttcttggggcctgatttgattaacccaggaagagtctcagacctcatgaagtactgccaggtctggcagcacttggccaaagcgggcaggtctgtgttgaggttgctttatgcagactaacaaagggatcattctgctgtgtacctgtccctattctagaccctggtgggcagcagtgggaccattctgaccacaatgcctgtaatgatggggcaagagaaagtgcccattaagcaggtacctgggggagtcaagcagcttgagccccccaaagaaggagaaaggcggacaacccataatatcattgagaaacgatatcgctcctccatcaatgacaaaatcatcgaattgaaagacctggtcatggggacagacgccaagatgcacaagtctggcgttctgaggaaggccattgattacaccagatgcctgaaaggcctccatggctttcctgcccttcctggttccggacagctggggaaaggccacagcagctcctctgctgccctgcagtctttgggggcggggagggctggacatgtggaaccctgatgcagccgcagcgtcaaggacgaggaaggggtgggaagggatggtacgtggaggggaatgggtggtgggaccagggacccaatgctaataaagactggactgtgcttcaaaaaaaaaaa

SEQ ID NO: 147 - DNA, 3519 bp, Homo sapiens
  CDS (312)..(3044)
agtgcaagacgggcgggctgctgagggcgccccgcgggtctggtctgggccggggaactccgggacggcgccgcagcagggctacggatctctcggcccctgcccttcaaatcacctctaggcacaggttattcagcttctcaaggctggaaaagcgaaggaagtttcctacaatgcactagcctcacacataatctcagaggatggggacaatccagaggtgggagaagctcgggaagtctttgacttacctgttgtaaagccttcttgggtgattctgtccgttcagtgtggaactcttctgccagtaaatggtttttctccagaatcatgtcagattttttttggaatcactgcctgcctttctcagggtgttgatacaagctggagctctttgttggagtcttccagagctctcccaaggagaggtagggaagggagcttgtccagcagaagttgggaagcacagagatcatctgccttcttctgacccggtattgatgcaggctgaggcctctgttgtaatgtgctgggtgtcatctgaagacagaagtgccctgtgggctttggttacgttctatgggggagattgccagctaaccctcaataagaaatgcacgcatttgattgttccagagccaaagggggggaaatacgaatgtgctttaaagcgagcaagtattaaaattgtgactcctgactgggttctggattgcgtatcagagaaaaccaaaaaggacgaagcattttatcatcctcgtctgattatttatgaagaggaagaagaggaagaggaagaggaggaggaagtagaaaatgaggaacaagattctcagaatgagggtagtacagatgagaagtcaagccctgccagctctcaagaagggtctccttcaggtgaccagcagttttcacctaaatccaacactgaaaaatctaaaggggaattaatgtttgatgattcttcagattcatcaccggaaaaacaggagagaaatttaaactggaccccggccgaagtcccacagttagctgcagcaaaacgcaggctgcctcagggaaaggagcctgggttgattaacttgtgtgccaatgtcccacccgtcccaggtaacattttgccccctgaggtccggggtaatttaatggctgctggacaaaacctccaaagttctgaaagatcagaaatgatagctacctggagtccagctgtacggacactgaggaatattactaataatgctgacattcagcagatgaaccggccatcaaatgtagcacatatcttacagactctttcagcacctacgaaaaatttagaacagcaggtgaatcacagccagcagggacatacaaatgccaatgcagtgctgtttagccaagtgaaagtgactccagagacacacatgctacagcagcagcagcaggcccagcagcagcagcagcagcacccggttttacaccttcagccccagcagataatgcagctccagcagcagcagcagcagcagatctctcagcaaccttacccccagcagccgccgcatccattttcacagcagcagcagcagcaacagcagccaccaccatcgcctcagcagcatcagctttttggacatgatccagcagtggagattccagaagaaggcttcttattgggatgtgtgtttgcaattgcggattatccagagcagatgtctgataagcaactgctggccacctggaaaaggataatccaggcacatggcggcactgttgaccccaccttcacgagtcgatgcacgcaccttctctgtgagagtcaagtcagcagcgcgtatgcacaggcaataagagaaagaaagagatgtgttactgcacactggttaaacacagtcttaaaaaaaaaaaaaatggtaccgccgcaccgagcccttcacttcccagtggccttcccaccaggaggaaagccatgttcacagcatattatttctgtgactggatttgttgatagtgacagagatgacctaaaattaatggcttatttggcaggtgccaaatatacgggttatctatgccgcagcaacacagtcctcatctgtaaagaaccaactggtttaaagtatgaaaaagccaaagagtggaggataccctgtgtcaacgcccagtggcttggcgacattcttctgggaaactttgaggcactgaggcagattcagtatagtcgctacacggcattcagtctgcaggatccatttgcccctacccagcatttagttttaaatcttttagatgcttggagagttcccttaaaagtgtctgcagagttgttgatgagtataagactacctcccaaactgaaacagaatgaagtagctaatgtccagccttcttcccaaagagccagaattgaagacgtaccacctcccactaaaaagctaactccagaattgaccccttttgtgcttttcactggattcgagcctgtccaggttcaacagtatattaagaagctctacattcttggtggagaggttgcggagtctgcacagaagtgcacacacctcattgccagcaaagtgactcgcaccgtgaagttcctgacggcgatttctgtcgtgaagcacatagtgacgccagagtggctggaagaatgcttcaggtgtcagaagttcattgatgagcagaactacattctccgagatgctgaggcagaagtacttttctctttcagcttggaagaatccttaaaacgggcacacgtttctccactctttaaggcaaaatatttttacatcacacctggaatctgcccaagtctttccactatgaaggcaatcgtagagtgtgcaggaggaaaggtgttatccaagcagccatctttccggaagctcatggagcacaagcagaactcgagtttgtcggaaataattttaatatcctgtgaaaatgaccttcatttatgccgagaatattttgccagaggcatagatgttcacaatgcagagttcgttctgactggagtgctcactcaaacgctggactatgaatcatataagtttaactgatggcgtctaggctgccgtgcatgtcgactcctgcggtgcggggctggctgtctggctggcgaggagctgctgcgcttccttcacatgctcttgttttccagctgctttcctgggggatcagactgtgaagcaggaagacagatataataaatatactgcatctttttaagatgtgcaattttattctgaggaaacataaattatgttttgtattatatgactttaagagcccacattaggttttatgattcatttgccaggtttttaaatgttttcacaaaactgttacgggacttcaactagaaataaaatggtgtaaataaagaccttgctatctctaaattatggatgttaaagatttgaaatgttttgtactttgattatttttatttcttatactctgttttcttttatattgatatcttgcccacattttaaataaatgtacttttgaacttagaaaaaaaaaaaa

SEQ ID NO: 148 - DNA, 865 bp, Homo sapiens
  CDS (385)..(597)
  misc_feature (1)...(865): n = a,t,c or g
ggcacgaggttagttttccttctaacggacaggaccctcagctgcaggtctgttggaataccctgcagtgtgaggtgtcagtgtgcccctgctggggggtgcctcccagttaggctgctcgggggtcaggggtcagggacccacttgaggaggcagtctgcccgttctcagatctccagctgcgtgctgggagaaccactgctctcttcaaagctgtcagacagggacatttaagtctgcagaggttactgctgtctttttgtttgtctgtgccctgcccccagaggtggagcctacagaggcaggcaggcctccttgagctgtggtgggctccacccagttcgagcttcccggctgctttgtttacctaagcaagcctgggcaatggcgggcgcccctcccccagcctcgttgccgccttgcagtttgatctcagactgctgtgctagcaatcagcgagattccgtgggcgtaggaccctctgagccaggtgtgggatatagtctcgtggtgcgccgtttcttaagccggtctgaaaagcgcaatattcgggtgggagtgacccgattttccaggtgcgtccgtcacccctttctttgactcggaaagggaactccctgaccccttgcgcttcccaagcgaggcaatgcctcgccctgcttcggctcgcgcacggtgcgcgcacccactgacctgcgcccagtgtctggcactccctagtgagatgaacccggtacctcagatggaaatgcagaaatcacccgtcttctgcggcgctcacgctgggagctgtagactagagctgttcctatttggctcgtgccgtttgcagcagntcgtcagttnnctcaattnncnggccccc

SEQ ID NO: 149 - DNA, 1183 bp, Homo sapiens
  CDS (187)..(801)
acaatgactaatcaaactaacctcaaaacaaatgataaccatacacaacactaaaggacgaacctgatctcttatactagtatccttaatcatttttattgccacaactaacctcctcggactcctgccttactcatttacaccaaccacccaactatctataaacctagccatggccatccccttatgagcgggcgcagtggttataggctttcgctcttgctgttggcggcgctgggcagcggccgcgcggagcgcgactgccgagtgagcagcttccgagtcaaggagaacttcgacaaggctcgcttctctgggacctggtacgccatggccaagaaggaccccgagggcctctttctgcaggacaacatcgtcgcggagttctccgtggacgagaccggccagatgagcgccacagccaagggccgagtccgtcttttgaataactgggacgtgtgcgcagacatggtgggcaccttcacagacaccgaggaccctgccaagttcaagatgaagtactggggcgtagcctcctttctccagaaaggaaatgatgaccactggatcgtcgacacagactacgacacgtatgccgtgcagtactcctgccgcctcctgaacctcgatggcacctgtgctgacagctactccttcgtgttttcccgggaccccaacggcctgcccccagaagcgcagaagattgtaaggcagcggcaggaggagctgtgcctggccaggcagtacaggctgatcgtccacaacggttactgcgatggcagatcagaaagaaaccttttgtagcaatatcaagaatctagtttcatctgagaacttctgattagctctcagtcttcagctctatttatcttaggagtttaatttgcccttctctccccatcttccctcagttcccataaaaccttcattacacataaagatacacgtgggggtcagtgaatctgcttgcctttcctgaaagtttctggggcttaagattccagactctgattcattaaactatagtcaccgtgtctggaaaaaataaaaaaaaatctctgccgattcttggctgaaggccaattcctattgtggtgcataaatcgcatatgtcatagtgtttctgggtgatgtattccgtaaattcaacacaacagccgaacctagtgaaggctggtgccta

SEQ ID NO: 150 - DNA, 4211 bp, Homo sapiens
  CDS (26)..(2536)
cagctcggtcgcccccaccggccccatggcagcccccggcgccccagctgagtacggctacatccggaccgtcctgggccagcagatcctgggacaactggacagctccagcctggcgctgccctccgaggccaagctgaagctggcggggagcagcggccgcggcggccagacagtcaagagcctgcggatccaggagcaggtgcagcagaccctcgcccggaagggccgcagctccgtgggcaacggaaatcttcaccgaaccagcagtgttcctgagtatgtctacaacctacacttggttgaaaatgattttgttggaggccgttcccctgttcctaaaacctatgacatgctaaaggctggcacaattgccacttatgaaggtcgctggggaagaggaacagcacagtacagctcccagaagtccgtggaagaaaggtccttgaggcatcctctgaggagactggagatttctcctgacagcagcccggagagggctcactacacgcacagcgattaccagtacagccagagaagccaggctgggcacaccctgcaccaccaagaaagcaggcgggccgccctcctagtgccaccgagatatgctcgttccgagatcgtgggggtcagccgtgctggcaccacaagcaggcagcgccactttgacacataccacagacagtaccagcatggctctgttagcgacaccgtttttgacagcatccctgccaacccggccctgctcacgtaccccaggccagggaccagccgcagcatgggcaacctcttggagaaggagaactacctgacggcagggctcactgtcgggcaggtcaggccgctggtgcccctgcagcccgtcactcagaacagggcttccaggtcctcctggcatcagagctccttccacagcacccgcacgctgagggaagctgggcccagtgtcgccgtggattccagcgggaggagagcgcacttgactgtcggccaggcggccgcagggggaagtgggaatctgctcactgagagaagcactttcactgactcccagctggggaatgcagacatggagatgactctggagcgagcagtgagtatgctcgaggcagaccacatgccgccatccaggatttctgctgcagctactttcatacagcacgagtgcttccagaaatctgaagctcggaagagggttaaccagcttcgtggcatcctcaagcttctgcagctcctaaaagttcagaatgaagacgttcagcgagctgtgtgtggggccttgagaaacttagtatttgaagacaatgacaacaaattggaggtggctgaactaaatggggtacctcggctgctccaggtgctgaagcaaaccagagacttggagactaaaaaacaaataacaggtttgctgtggaatttgtcatctaatgacaaactcaagaatctcatgataacagaagcattgcttacgctgacggagaatatcatcatccccttttctgggtggcctgaaggagactacccaaaagcaaatggtttgctcgattttgacatattctacaacgtcactggatgcctaagaaacatgagttctgctggcgctgatgggagaaaagcgatgagaagatgtgacggactcattgactcactggtccattatgtcagaggaaccattgcagattaccagccagatgacaaggccacggagaattgtgtgtgcattcttcataacctctcctaccagctggaggcagagctcccagagaaatattcccagaatatctatattcaaaaccggaatatccagactgacaacaacaaaagtattggatgttttggcagtcgaagcaggaaagtaaaagagcaataccaggacgtgccgatgccggaggaaaagagcaaccccaagggcgtggagtggctgtggcattccattgttataaggatgtatctgtccttgatcgccaaaagtgtccgcaactacacacaagaagcatccttaggagctctgcagaacctcacggccggaagtggaccaatgccgacatcagtggctcagacagttgtccagaaggaaagtggcctgcagcacacccgaaagatgctgcatgttggtgacccaagtgtgaaaaagacagccatctcgctgctgaggaatctgtcccggaatctttctctgcagaatgaaattgccaaagaaactctccctgatttggtttccatcattcctgacacagtcccgagtactgaccttctcattgaaactacagcctctgcctgttacacattgaacaacataatccaaaacagttaccagaatgcacgcgaccttctaaacaccgggggcatccagaaaattatggccattagtgcaggcgatgcctatgcctccaacaaagcaagtaaagctgcttccgtccttctgtattctctgtgggcacacacggaactgcatcatgcctacaagaaggctcagtttaagaagacagattttgtcaacagccggactgccaaagcctaccactcccttaaagactgaggaaaatgacaaagtattctcggctgcaaaaatccccaaaggaaaacacctatttttctactacccagcccaagaaacctcaaaagcatgccttgtttctatccttctctatttccgtggtcccctgaatccagaaaacaaatagaacataattttatgagtcttccagaagacctttgcaagtttgccaccagtagataccggccacaggctcgacaaatagtggtctttgttattagggcttatggtagatggcttcctggaatcaaaatgtgaattcatgtggaagggacattaatccaataaataaggaaagaagctgttgcattactgggattttaaaagtttgatttacatttatattccttttctggttcccatgttttgtcactcatgtgcacattgcttcgccattgggcctccagtgtattgttctgcagtgttgaaacagaatggaaatgacaagaaatatctgcagttatccaggagaaagtataatggcaaaattattggtttctttctttactttgtgcttgtttttatccccttggttgtttttctctgatttttaaataaacttaagaaatttagattacagagtatgcatgactgtaagaaaaagaaattgagaggaagtgatcatagcaaattaaagaagtcttttcctcccagaacttaaagtaaaataaaaaataaataaataaataaaatcttttccacagagaaaggcaactgtgatgataaaatttaacgttcccccaaacactgagtcaatgagatttttctcaggagatactttacctataacaacgccgttaaatccaaatctcttctaaacgatggcattctatgtaatgcctttcctggacttttttggccactgccctggactagtgaaagaatggactctatctttatctgcaagaggaactaaggccttctatcagactgcctggccagcctggggcactgaaaatacggctcatgttaatgagttacattatcagccagcccagccttgcccaccatttaagaaatatcacagagccactagatctcatatgatcttcttcaagccattattttaactcaagaaaactctagagaagaaaagtgaagaagtcatgttgaagaagatgtaagaatgtgtcaagaccatccagaaatgatatgagaaatactgatattttaaatggttgacatcatccagcgaaatgaatctacattaaatgttgttttaactgcgctatgattaaaaccattcatatagagttagtctttacaactactattctgttatttttttttttaatctgacaacatttgtcctaagtaagataagcaaaaaaattcttcaactccttttggcaagaaaactgtaacagaaaataaattttgaatgtgtacttaagtctttattatatttgaagcaattttttttcaattttaaaagctgaatgaagacaacttaggttgctaacctagttcaaaatgaaattatttagataccaatttttaaaatactggagagaatttatatgtctttttccagagttctgattataagcatttggagtgcatttattcctccagataataaatgtgtgttcagaactttttgtgttttttaaggcattaataaagccttcgataatattaaatacaaaaaaaa

SEQ ID NO: 151 - DNA, 1045 bp, Homo sapiens
  CDS (51)..(719)
ctgcaccatattccagaacaactgagcaaacaagagaggtacaccgacaaatggcagcgacgcacacaccccctctggcgtcaccgggcatggcgcgcatctgcctttacggggatttacaacgatttggtcgccgcatcgaccttcgtgtgaaaacgggggctgaagccatccgggcactggccacacagctcccggcgtttcgtcagaaactgagcgacggctggtatcaggtacggattgccgggcgggacgtcagcacgtccgggttaacggcgcagttacatgagactctgcctgatggcgctgtaattcatattgttcccagagtcgccggggccaagtcaggtggcgtattccagattgtcctgggggctgccgccattgccggatcattctttaccgccggagccacccttgcagcatggggggcagccattggggccggtggtatgaccggcatcctgttttctctcggtgccagtatggtgctcggtggtgtggcgcagatgctggcaccgaaagccagaactccccgtatacagacaacggataacggtaagcagaacacctatttctcctcactggataacatggttgcccagggcaatgttctgcctgttctgtacggggaaatgcgcgtggggtcacgcgtggtttctcaggagatcagcacggcagacgaaggggacggtggtcaggttgtggtgattggtcgctgatgcaaaatgttttatgtgaaaccgcctgcgggcggttttgtcatttatggagcgtgaggaatgggtaaaggaagcagtaaggggcataccccgcgcgaagcgaaggacaacctgaagtccacgcagttgctgagtgtgatcgatgccatcagcgaagggccgattgaaggtccggtggatggcttaaaaagcgtgctgctgaacagtacgccggtgctggacactgaggggaataccaacatatccggtgtcacggtggcgttcccggctgttgagcaggatcatactcccccccaaaggatttggatcctccccccccccac

SEQ ID NO: 152 - DNA, 714 bp, Homo sapiens
  CDS (18)..(668)
aggaggagaaattaggtatggatgacttgactaagttggtacaggaacagaaacctaaaggcagtcagcgaagtcggaaaagaggccatacggcttcagaatctgatgaacagcagtggcctgaggaaaagaggctcaaagaagatatattagaaaatgaagatgaacagaatagtccgccaaaaaagggtaaaagaggccgaccaccaaaacctcttggtggaggtacaccaaaagaagagccaacaatgaaaacttctaaaaaaggaagcaaaaaaaaatctggacctccagcaccagaggaggaggaagaagaagaaagacaaagtggaaatacggaacagaagtccaaaagcaaacagcaccgagtgtcaaggagagcacagcagagagcagaatctcctgaatctagtgcaattgaatccacacagtccacaccacagaaaggacgaggaagaccatcaaaaacgccatcaccatcacaaccaaaaaaaaatgtccgtgtaggacgctccaaacaagcagctactaaggaaaatgattcaagtgaagaagtagatgtgtttcagggtagctctcctgtcgatgatattccacaggaagaaacagaggaggaggaagtttctacagtaaatgtacggcggcgaagtgctaaaagggaacggcgatgaacaaatgtaattaataactttctctgtgaaagctttggaaaaa

SEQ ID NO: 153 - DNA, 1563 bp, Homo sapiens
  CDS (209)..(1324)
agatcgagcgaggagcccaagagcgagcgcgcagcacgaagctcgagccgcctccgccgcgcgaccccacctcggccgccgccgcctgcgccgcgagatccgccccggcctccccgagagcgagccccggccgccgcgaccaccagccgcgctaaccgccgaccaaccgccaccgaggcgcctgagcgagagcagaggaggaggaggcatgagtgaggcgggcgaggccaccaccaccaccaccaccaccctcccgcaggctccgacggaggcggccgccgcggctccccaggaccccgcgcccaagagcccggtgggcagcggtgcgccccaggccgcggccccggcgcccgccgcccacgtcgcaggaaaccccggtggggacgcggcccccgcagccacgggcaccgcggccgccgcctctttagccaccgccgccggcagcgaagacgcggagaaaaaagttctcgccaccaaagtccttggcactgtcaaatggttcaacgtcagaaatggatatggatttataaatcgaaatgacaccaaagaagatgtatttgtacatcagactgccatcaagaagaataacccacggaaatatctgcgcagtgtaggagatggagaaactgtagagtttgatgtggttgaaggagagaagggtgcagaagctgccaatgtgactggcccggatggagttcctgtggaagggagtcgttacgctgcagatcggcgccgttacagacgtggctactatggaaggcgccgtggccctccccggaattacgctggggaggaggaggaggaagggagcggcagcagtgaaggatttgacccccctgccactgataggcagttctctggggcccggaatcagctgcgccgcccccagtatcgccctcagtaccggcagcggcggttcccgccttaccacgtgggacagacctttgaccgtcgctcacgggtcttaccccatcccaacagaatacaggctggtgagattggagagatgaaggatggagtcccagagggagcacaacttcagggaccggttcatcgaaatccaacttaccgcccaaggtaccgtagcaggggacctcctcgcccacgacctgccccagcagttggagaggctgaagataaagaaaatcagcaagccaccagtggtccaaaccagccgtctgttcgccgtggataccggcgtccctacaattaccggcgtcgcccgcgtcctcctaacgctccttcacaagatggcaaagaggccaaggcaggtgaagcaccaactgagaaccctgctccacccacccagcagagcagtgctgagtaacaccaggctcctcaggcaccttcaccatcggcaggtgacctaaagaattaatgaccattcagaaataaagcaaaaagcaggccacaaccttaaccaacaccaaagaaacatccaagcaataaagtggaagactaaccaagatttggacattggaatgtttactgttattctttaagaaacaactacaaaaagaaaatgtcaacaaatttttccagcaagctgagaacctggaattc

SEQ ID NO: 154 - DNA, 1174 bp, Homo sapiens
  CDS (209)..(1117)
agatcgagcgaggagcccaagagcgagcgcgcagcacgaagctcgagccgcctccgccgcgcgaccccacctcggccgccgccgcctgcgccgcgagatccgccccggcctccccgagagcgagccccggccgccgcgaccaccagccgcgctaaccgccgaccaaccgccaccgaggcgcctgagcgagagcagaggaggaggaggcatgagtgaggcgggcgaggccaccaccaccaccaccaccaccctcccgcaggctccgacggaggcggccgccgcggctccccaggaccccgcgcccaagagcccggtgggcagcggtgcgccccaggccgcggccccggcgcccgccgcccacgtcgcaggaaaccccggtggggacgcggcccccgcagccacgggcaccgcggccgccgcctctttagccaccgccgccggcagcgaagacgcggagaaaaaagttctcgccaccaaagtccttggcactgtcaaatggttcaacgtcagaaatggatatggatttataaatcgaaatgacaccaaagaagatgtatttgtacatcagactgccatcaagaagaataacccacggaaatatctgcgcagtgtaggagatggagaaactgtagagtttgatgtggttgaaggagagaagggtgcagaagctgccaatgtgactggcccggatggagttcctgtggaagggagtcgttacgctgcagatcggcgccgttacagacgtggctactatggaaggcgccgtggccctccccggaatgctggtgagattggagagatgaaggatggagtcccagagggagcacaacttcagggaccggttcatcgaaatccaacttaccgcccaaggtaccgtagcaggggacctcctcgcccacgacctgccccagcagttggagaggctgaagataaagaaaatcagcaagccaccagtggtccaaaccagccgtctgttcgccgtggataccggcgtccctacaattaccggcgtcgcccgcgtcctcctaacgctccttcacaagatggcaaagaggccaaggcaggtgaagcaccaactgagaaccctgctccacccacccagcagagcagtgctgagtaacaccaggctcctcaggcaccttcaccatcggcaggtgacctaaagaattaatga

SEQ ID NO: 155 - DNA, 787 bp, Homo sapiens
  CDS (84)..(392)
gggagagcggcggggccgagagcgtgactcgcccgctccgcgctgcttcccccgcgccgcctccccgcgccgctcgcgcagccatgtccgaggagaagcccaaggagggtgtgaagacagagaatgaccacatcaacctgaaggtggccgggcaggacggctccgtggtgcagttcaagatcaagaggcacacgccgctgagcaagctgatgaaggcctactgcgagaggcagggcttgtcaatgaggcagatcagattcaggttcgacgggcagccaatcaatgaaactgacactccagcacagctggagatggaggacgaggacaccatcgacgtgttccagcagcagacgggaggtgtgccggagagcagcctggcagggcacagtttctagagggcccgtccccagcccgggccgtccatcctcgcattgctgttgaatggtgagcacgtgaccatgccgaccacaaaggtgtctgcggaaactcgaggacattcaccacgatgattttcctctctttgatgtacttcaagtgcaactcaaaactatatctgcagggatgaatctgtaacttaaattgggccaatcagaattgttatctttgttcaggtaaaatgagttgcaagatattgtgggtacttttgtgtgctcatttgtgttttccccccctcctacaacatttttttaaccccaaaattatagcctgaatgttcgcttttagtctggccagggatctgactcctgagttggttgcctctcccctgctcactccagtcacatagaga

SEQ ID NO: 156 - DNA, 1541 bp, Homo sapiens
  CDS (8)..(1255)
cagggccatggcggaggagcagggccgggaacgggactcggttcccaagccgtcggtgctgttcctccacccagacctgggcgtgggcggcgctgagcggctggtgttggacgcggcgctggcgctgcaggcgcgcgggtgtagcgtgaagatctggacagcgcactacgacccgggccactgtttcgccgagagccgcgagctaccggtgcgctgtgccggggactggctgccgcgaggcctgggctggggcggccgcggcgccgccgtctgcgcctacgtgcgcatggttttcctggcgctctacgtgctgttcctcgccgacgaggagttcgacgtggtagtgtgcgaccaggtgtctgcctgtatcccagtgttcaggctggctagacggcggaagaagatcctattttactgtcacttcccagatctgcttctcaccaagagagattcttttcttaaacgactatacagggccccaattgactggatagaggaatacaccacaggcatggcagactgcatcttagtcaacagccagttcacagctgctgtttttaaggaaacattcaagtccctgtctcacatagaccctgatgtcctctatccatctctaaatgtcaccagctttgactcagttgttcctgaaaagctggatgacctagtccccaaggggaaaaaattcctgctgctctccatcaacagatacgaaaggaagaaaaatctgactttggcactggaagccctagtacagctgcgtggaagattgacatcccaagattgggagagggttcatctgatcgtggcaggtggttatgacgagagagtcctggagaatgtggaacattatcaggaattgaagaaaatggtccaacagtccgaccttggccagtatgtgaccttcttgaggtctttctcagacaaacagaaaatctccctcctccacagctgcacgtgtgtgctttacacaccaagcaatgagcactttggcattgtccctctggaagccatgtacatgcagtgcccagtcattgctgttaattcgggtggacccttggagtccattgaccacagtgtcacagggtttctgtgtgagcctgacccggtgcacttctcagaagcaatagaaaagttcatccgtgaaccttccttaaaagccaccatgggcctggctggaagagccagagtgaaggaaaaattttcccctgaagcatttacagaacagctctaccgatatgttaccaaactgctggtataatcagattgtttttaagatctccattaatgtcatttttatggattgtagacccagttttgaaaccaaaaaagaaacctagaatctaatgcagaagagatcttttaaaaaataaacttgagtcttgaatgtgagccactttcctatataccacacctccctgtccacttttcagaaaaaccatgtcttttatgctataatcattccaaattttgccagtgttaagttacaaatgtggtgtcattccatgttcagcagagtattttaattatattttctcgggatt

SEQ ID NO: 157 - DNA, 1106 bp, Homo sapiens
  CDS (513)..(1103)
ccgtgcggtggaattcagcccctcaagtgctgggattacaggcgtgagccactgcacccggttgatattttttctaacaattttttttttctcttccacaaagggtagtacaaagttaggggtgtgctcagctttctatgtaacctaatatggggaaagctgacctcggaagggggtaagatcaatctcctctacgcctttgccatggtacccagtgccaaccactccacattaatcagccatgtgctgttccaggggtcactgtcattcggggacgtggctgtgggcttcacccggaaagagtggcagcagctggacctggagcaaaggaccctgtaccaggatgtgatgctggagaactacagccacctgctctctgtgggctgaactgtctgcttgcttggaaggcccagctggctcagcacaaatcctttgaccgtttctccccaagagggtgtcaagtcagcaaaccagctgtgatctccagtttggagcaggggaaggagccatggatggaggaggaagagataaggacgtggagcttcccaggagcgaatccacgcggaggtcaccagtgtggaagtgctttaagctgtgacgagggagttcctgcagctcagggagccagtagtgagaaaccccacgaatgcacgaagtgtgggaaagccttgtgctgcagatcggacctcagggtacatcacggggtccacgcgggggagaagtcctctgcgtgcagtgaacgggggagtggtttcagggagaagctttgccctgacaaacagggaactcacacaaaggagaaacccgctagagacagcagaagtggtaaaacgatcttccggaagacacgcctgtgtgtcccgggcacagttcacgccggagcgaagccttacaagtgttgggagtgtgagaaaacctcccacaagtcgcgcctcatcgagcaccttcgctcccacacgggggagaagccctgcggctgcagggaatgcggaaaggcctttttccagaagtcacacctcatcctgcgtcagaggactcacacgggggagaagccctgcgactgcgcggagtgcgggaaagctgctcccaggactcctgcctcctga

SEQ ID NO: 158 - DNA, 4164 bp, Homo sapiens
  CDS (2956)..(3978)
atgacatcgctgcgcgaatatgccggttatcacggcggtggcagcggatttggagggcagttgcggtcgtggaacccaccgagtgaaagtgtggatgcagccctgttgcccaactttacccgtggcaatgcccgcgcagacgatctggtacgcaataacggctatgccgccaacgccatccagctgcatcaggatcatatcgtcgggtcttttttccggctcagtcatcgcccaagctggcgctatctgggcatcggggaggaagaagcccgtgccttttcccgcgaggttgaagcggcatggaaagagtttgccgaggatgactgctgctgcattgacgttgagcgaaaacgcacgtttaccatgatgattcgggaaggtgtggccatgcacgcctttaacggtgaactgttcgttcaggccacctgggataccagttcgtcgcggcttttccggacacagttccggatggtcagcccgaagcgcatcagcaacccgaacaataccggcgacagccggaactgccgtgccggtgtgcagattaatgacagcggtgcggcgctgggatattacgtcagcgaggacgggtatcctggctatatgccgcagaaatggacatggataccccgtgagttacccggcgggcgcgcctcgttcattcacgtttttgaacccgtggaggacgggcagactcgcggtgcaaatgtgttttacagcgtgatggagcagataaagatgctcgacacgctgcagaacacgcagctgcagagcgccattgtgaaggcgatgtatgccgccaccattgagagtgagctggatacgcagtcagcgatggattttattctgggcgcgaacagtcaggagcagcgggaaaggctgaccggctggattggtgaaattgccgcgtattacgccgcagcgccggtccggctgggaggcgcaaaagtaccgcacctgatgccgggtgactcactgaacctgcagacggctcaggatacggataacggctactccgtgtttgagcagtcactgctgcggtatatcgctgccgggctgggtgtctcgtatgagcagctttcccggaattacgcccagatgagctactccacggcacgggccagtgcgaacgagtcgtgggcgtactttatggggcggcgaaaattcgtcgcatcccgtcaggcgagccagatgtttctgtgctggctggaagaggccatcgttcgccgcgtggtgacgttaccttcaaaagcgcgcttcagttttcaggaagcccgcagtgcctgggggaactgcgactggataggctccggtcgtatggccatcgatggtctgaaagaagttcaggaagcggtgatgctgatagaagccggactgagtacctacgagaaagagtgcgcaaaacgcggtgacgactatcaggaaatttttgcccagcaggtccgtgaaacgatggagcgccgtgcagccggtcttaaaccgcccgcctgggcggctgcagcatttgaatccgggctgcgacaatcaacagaggaggagaagagccagcttgggatcagcagcctgacggatgcggtgtccggcgacagcctgactgcccaggaggcactcgcgacgctggcattatccggtgatgatgacggaccacgacaggcccgcagttatcaggtcatgaacggcatcgccgtgctgccggtgtccggcacgctggtcagccggacgcgggcgctgcagccgtactcggggatgaccggttacaacggcattatcgcccgtctgcaacaggctgccagcgatccgatggtggacggcattctgctcgatatggacacgcccggcgggatggtggcgggggcatttgactgcgctgacatcatcgcccgtgtgcgtgacataaaaccggtatgggcgcttgccaacgacatgaactgcagtgcaggtcagttgcttgccagtgccgcctcccggcgtctggtcacgcagaccgcccggacaggctccatcggcgtcatgatggctcacagtaattacggtgctgcgctggagaaacagggtgtggaaatcacgctgatttacagcggcagccataaggtggatggcaacccctacagccatcttccggatgacgtccgggagacactgcagtcccggatggacgcaacccgccagatgtttgcgcagaaggtgtcggcatataccggcctgtccgtgcaggttgtgctggataccgaggctgcagtgtacagcggtcaggaggccattgatgccggactggctgatgaacttgttaacagcaccgatgcgatcaccgtcatgcgtgatgcactggatgcacgtaaatcccgtctctcaggagggcgaatgaccaaagagactcaatcaacaactgtttcagccactgcttcgcaggctgacgttactgacgtggtgccagcgacggagggcgagaacgccagcgcggcgcagccggacgtgaacgcgcagatcaccgcagcggttgcggcagaaaacagccgcattatggggatactcaactgtgaggaggctcacggacgcgaagaacaggcacgcgtgctggcagaaacccccggtatgaccgtgaaaacggcccgccgcattctggccgcagcaccacagagtgcacaggcgcgcagtgacactgcgctggatcgtctgatgcagggggcaccggcaccgctggctgcaggtaacccggcatctgatgccgttaacgatttgctgaacacaccagtccgtaagctggttgcgtgggatggcaccaccgacggtgctgccgttggcattcttgcggttgctgctgaccagaccagcaccacgctgacgttctacaagtccggcacgttccgttatgaggatgtgctctggccggaggctgccagcgacgagacgaaaaaacggaccgcgccgcctgtgcggctttttttacgggatttttttatgtcgatgtacacaaccgcccaactgctggcggcaaatgagcagaaatttaagtttgatccgctgtttctgcgtctctttttccgtgagagctatcccttcaccacggagaaagtctatctctcacaaattccgggactggtaaacatggcgctgtacgtttcgccgattgtttccggtgaggttatccgttcccgtggcggctccacctctgaatttacgccgggatatgtcaagccgaagcatgaagtgaatccgcagatgaccctgcgtcgcctgccggatgaagatccgcagaatctggcggacccggcttaccgccgccgtcgcatcatcatgcagaacatgcgtgacgaagagctggccattgctcaggtcgaagagatgcaggcagtttctgccgtgcttaagggcaaatacaccatgaccggtgaagccttcgatccggttgaggtggatatgggccgcagtgaggagaataacatcacgcagtccggcggcacggagtggagcaagcgtgacaagtccacgtatgacccgaccgacgatatcgaagcctacgcgctgaacgccagcggtgtggtgaatatcatcgtgttcgatccgaaaggctgggcgctgttccgttccttcaaagccgtcaaggagaagctggatacccgtcgtggctctaattccgagctggagacagcggtgaaagacctgggcaaagcggtgtcctataaggggatgtatggcgatgtggccatcgtcgtgtattccggacagtacgtggaaaacggcgtcaaaaagaacttcctgccggacaacacgatggtgctggggaacactcaggcacgcggtctgcgcacctatggctgcattcaggatgcggacgcacagcgcgaaggcattaacgcctctgcccgttacccgaaaaactgggtgaccaccggcgatccggcgcgtgagttcaccatgattcagtcagcaccgctgatgctgctggctgaccctgatgagttcgtgtccgtacaactggcgtaatcatggcccttcggggccattgtttctctgtggaggagtccatgacgaaagatgaactgattgcccgtcttcgctcgctgggtgaacaacttgaacccggatgtcaagcctgacgggggacgaaagaagaactggcgctccgttgttggcaagagcttgaaagaggagcttgatgacacgagg

SEQ ID NO: 159 - DNA, 479 bp, Homo sapiens
  CDS (192)..(422)
gtgatacccaggtaaacagggtctggagtggatctccaacaaactccagcagacctgcagcagaggggcctgactgttataaggaaaactaacaaacagaaaggaatagcgtcaacatcaacaaaaaggacatccacacagaaaccccatgcaaaggtcaccagcatcaaagaccaaaggtagataaatccatgaagatgaggaaaaaccagtgcaaaaaggctgaaaattccaaaaaccagaatggctcttctcctgcaaaggattacaactcctcaccagcaagggaacaaaactggatggaaaattggttagacaaattgacagaagtaggcttcatcaggtggataataacaaactctttcaagctaaaggagcatgttctaacccaatgcaaggaactaagaagcttgaaaaaaagttagaggaactgctgactaaaataatcagtttagagaagaccatcaggtttaggggaa

SEQ ID NO: 160 - DNA, 1566 bp, Homo sapiens
  CDS (25)..(585)
tgggcggcggcggcggcggcggtcatggaacgccaagaggagtctctgtccgcgcggccggccctggagaccgaggggctgcgcttcctgcacaccacggtgggctccctgctggccacctatggctggtacatcgtcttcagctgcatccttctctacgtggtctttcagaagctttccgcccggctaagagccttgaggcagaggcagctggaccgagctgcggctgctgtggaacctgatgttgttgttaaacgacaagaagctttagcagctgctcgactgaaaatgcaagaagaactaaatgcgcaagttgaaaagcataaggaaaaactgaaacaacttgaagaagaaaaaaggagacagaagattgaaatgtgggacagcatgcaagaaggaaaaagttacaaaggaaatgcaaagaagccccaggaggaagacagtcctgggccttccacttcatctgtcctgaaacggaaatcggacagaaagcctttgcggggaggaggttataacccgttgtctggtgaaggaggcggagcttgctcctggagacctggacgcagaggcccgtcatctggcggatgaggctaagaatcttgttagtgtcacttttgacattagcaagatgaacccttaaccctcgattcaattgccttacgcacgcttttcacagtgactagccaaggggaggtggggttgatttctgttcctaactacacctgcatatgtcagggctccagtcagcaaaaggtatagatgttgcctctaggcatgaggtcattggtcacattctacttggagacagtgattgcattcattgatttcatggttaattgctagttggtaggtaaaggcctctagatgattagcaatcttgataaaagaggcctagtaatgttcttttgaggttagaaatccttgctgctaggacagtctctgtgacaggttgcgttgaatgatgtcttccttatcaatggtgagcccaccagtgaggattactgatgtggacagttgatggggtttgtttctgtatatttatttttatgtacagaactttgtaaaaacgaaactatttaaaaaacaagaataacatttttagcatctttatttaatgtttgatagacaaattgaagtccataaatctccttgaataaagatgctaaaaatgttattcttgttttttaaatagtttcgtttttacaaagttctgtacataaaaataaatatacagaaacaaaccccatcaactgtccacatcagtaatcctcactggtgggctcaccattgataaggaagacatcattcaacgcaacctgtcacagagactgtcctagcagcaaggatttctaacctcaaaagaacattactaggcctcttttatcaagattgctaatcatctagaggcctttacctaccaactagcaattaaccatgaaatcaatgaatgcaatcactgtctccaagtagaatgtgaccaatgacctcatgcctagaggaacatctataccttttgctgactggagccctgacatatgcaggtgtagttaggaacagaaatcaacc

SEQ ID NO: 161 - DNA, 2450 bp, Homo sapiens
  CDS (89)..(883)
ttctcacgctttggctgtctggacttttaagtttttccgctttttcaggaaggcgaccggcagcctcgggcaggggagacaggactgtatgtcagagaagagacggcgcttggacgccaggaatcctctgaagcaggagactgccctatccaggttacccttcccgaggggaaaccagggtctccttcagaaagctgaggcaggccgggcgcggtggctcacgcctgtaatcccagcactttggaagaccgaggcgggcggatcacctgagaagatgactcaagaccggcctctgcttgccgtgcaggaggcgctgaagaagtgcttccccgtggtggaggagcagcagggcctgtggcagagtgccctgcgggactgccagcccctcctgtcctccctcagcaacctggcggaacagctgcaggccgcacagaacctgcggtttgaggatgtgccggcgcttcgggccttcccagatttaaaagagcggctgaggcgtaagcagctggtggctggtgacatcgtcctggacaagctaggggaaaggctagccatcctcctcaaggtgcgagacatggtcagcagccatgtggagcgagtgtttcagatctatgagcaacacgcagacacagttggcattgatgctgtcctgcagccttcagcagtgagcccctctgtggctgacatgttggaatggttgcaggatattgagagacattatcgaaagtcgtacctgaagagaaagtatcttctttcgtctatccagtggggagacttggcaaacatacaagctttgcccaaggcctgggaccgaatttcaaaagacgaacaccatgatcttgtacaagatatcctattgaatgtttccttcttcctggaagagtaaggaagctatgcgtatctggagaccacgggcaccacagttgaagactgacattctgaaccctgatgtttctaaagaaacgtcagtatttcagtctgacatatttgaaacatcagtgccttgaaccttaggactgggtcttggggaggattagcgcctagatgtctgattttggagctgcagcatgccaggccgtggctgagagtatgtgagccatgccttgcccttttctgaggctcagggaagtggatggagctagagaggcaacaggaaagacggtgctgaagaacatagtgtctttcctctattgtggacctaaagaggtggggaagcaaggacaagaggcaaagagccacactgcccttggcatcatccaaagcattgtctggttgacaccaggtcctggttttgtgtcttttgtcaatacctgaatccttgacaaaagaaaaagtggttttgatgatttaaagaaataagggtgattttgacagaaaatatattttaaaaattttgaccaattgcaatagttatcctcaagccaatttccagaacctgccaccagggggaggtggtgcagcatgaatcattctgaatgctttgtctttgaagtgttcccctattgctgttaccatctcagaggaagtaactgggcatggtgagactcctaaaatgacaggagtttttttggccaaagctggcatctgacttgccacattcctctgagtctggagtagccgcaggggtgggagaatgccagcccagagtcagtccatcggggttacatttccaaggtctgctgccttcatctatgtaatggccgtgttactttcagatctttcagcttcccagagtgttgtgggaatcttggtcattgaatgtaaagggacttagtaaagggtatagatatttttcaaaaatgaaaataactttttttcttataagtgataagcttttataaagatcataggaaaactagaaaaaatgtaaaatgtagaaaattgtaaaacaaacttcattagagatattttgatagataccttttcagtgtctatttacaaattttttcttttaatatagatagggtctcactatattgcccagctcactcctgagctcaagggatcctcccaccatagcctcccaaaatattggaaatacaggcatgagccactgctcctgaccaattcacaaatttttttaaagaacaaacgtgctatcatcgatacatactgttaggttgtctttttttaaaaaacctaatgtaatttgttcatctttttatatctgtaaatatagctcaacacagttatattctttttgtgaatgtattatatctacaatttaccttttttcttagattttacatgcattttcccaaatctttgtgtttgcctatctgtaaaggtaatacattctgattacaaaaaatgaaaatgttacatagaaatgtaccgttatccatctaccagataactattattaataatgtgtatttatttttccaggaattaaaaaacatctatcatataagtattgcaaataaaacttaaaaagcaaaaaaaaaaaa

SEQ ID NO: 162 - DNA, 1431 bp, Homo sapiens
  CDS (401)..(1381)
ctgcctcagataaagtgcaaaggccagtctgcagggatagtttcatcctctccccacgcgatgggctacacatcacctgcccaagctctctcccgacctgctagagcctagagggcggaggccggagaggctgcagccgggagtagcaccgcacatccgggaacgccagcagcgggctgagggctgcataactgatggaaggccgggcgcggtaagagcgtctcggggagtagggcaaggcggccgggcccctcccattccgccttttcttcagcgtcctacccgcggcactggctgcgagcgccgggccacctgcgagtgtgcgcagggactctggacacccgcggcggcgagctgagggagcagtctccacgaggacccaggcggaccctctggcgccatgcgcgccctccccggcctgctggaggccagggcgcgtacgccccggctgctcctcctccagtgccttctcgctgccgcgcgcccaagctcggcggacggcagtgccccagattcgccttttacaagtccacctctcagagaagaaataatggcaaataacttttccttggagagtcataacatatcactgactgaacattctagtatgccagtagaaaaaaatatcactttagaaaggccttctaatgtaaatctcacatgccagttcacaacatctggggatttgaatgcagtaaatgtgacttggaaaaaagatggtgaacaacttgagaataattatcttgtcagtgcaacaggaagcaccttgtatacccaatacaggttcaccatcattaatagcaaacaaatgggaagttattcttgtttctttcgagaggaaaaggaacaaaggggaacatttaatttcaaagtccctgaacttcatgggaaaaacaagccattgatctcttacgtaggggattctactgtcttgacatgtaaatgtcaaaattgttttcctttaaattggacctggtacagtagtaatgggagtgtaaaggttcctgttggtgttcaaatgaataaatatgtgatcaatggaacatatgctaacgaaacaaagctgaagataacacaacttttggaggaagatggggaatcttactggtgccgtgcactattccaattaggcgagagtgaagaacacattgagcttgtggtgctgagctatttggtgcccctcaaaccatttcttgtaatagtggctgaggtgattcttttagtggccaccattctgctttgtgaaaagtacacacaaaagaaaaagaagcactcagatgaggggaaagaatttgagcagattgaacagctgaaatcagatgatagcaatggtatagaaaataatgtccccaggcatagaaaaaatgagtctctgggccagtgaatacaaaacatcatgtcgagaatcattggaagatatacagagttcgt

SEQ ID NO: 163 - DNA, 1412 bp, Homo sapiens
  CDS (107)..(1186)
taagcttgcggccgccgctcaggtcaggcagccccagcgtccccgggccctcggtcccaccgagtgccggctcccgcgctctgcgcaagcccttggaattttcaaaatgaattatacagagtccagcccattgagagaatcaactgccataggttttacacctgagttagaaagtatcatacctgtgccttccaataagaccacttgtgaaaactggagagagatacatcatctggtttttcatgtagcaaatatttgttttgcagttgggttggttattccaactactcttcaccttcatatgatatttcttaggggaatgttaactctaggatgtaccctttatatcgtctgggccactctctaccgatgtgccttggatataatgatctggaactctgtgttcttgggtgtcaacattttgcatctgtcgtatcttttatacaagaagagaccggtaaagattgaaaaggaactcagtggcatgtaccggcgattgtttgaaccactccgtgtgcctccagatttgttcagaagactaactggacagttttgcatgatccaaaccttgaaaaagggccaaacttatgctgcagaggataaaacctcagttgatgaccgtctgagtattctcttgaagggaaaaatgaaggtctcctatcgaggacattttctgcataacatttacccctgtgcctttatagattctcctgaatttagatcaactcagatgcacaaaggtgaaaaattccaggtcaccattattgcagatgataactgcagatttttatgctggtcaagagaaagattaacatactttctggaatcagaacctttcttgtatgaaatctttaggtatcttattggaaaagacatcacaaataagctctactcattgaatgatcccaccttaaatgataaaaaagccaaaaagctggaacatcagctcagcctctgcacacagatctccatgttggaaatgaggaacagtatagccagctccagtgacagtgacgacggcttgcaccagtttcttcggggtacctccagcatgtcctctcttcatgtgtcatccccacaccagcgagcctctgccaagatgaaaccgatagaagaaggagcagaagatgatgatgacgtttttgaaccggcatctccaaatacattgaaagtccatcagctgccttgatcagagagagaattcaggttaccaagacggaaggtgtcttgaagagatcctgaaaaataccagcactttttcatggcttttaggttattctgctttagtgcatccagactggtagagtcggagggaggaagtgaggaagggtcaaggatggaagagttctttcacttaccctttttattagtcagcttttaaagtaattgttttactgaaaaaaaaaaaaaaa

SEQ ID NO: 164 - DNA, 1814 bp, Homo sapiens
  CDS (278)..(1192)
agaggacccaggtgtcctggcagtgggcgccgcggggcacacgctgggccaaggtgcaggcggccagggtgggagactgttcgccccgccctgagtactcctatcttgtttctccacctgttcgggagttggagatgtgcacctaaaggaggcgcatctggggacggacacatctggcactgaggccctcgccacctgcctcgccacctggcgaccctgaccccaccacactgccttgagagtcgctcaaaagtagggccccagggctcgcagcagcatgggcaccgagaaagaaagcccagagcccgactgccagaaacagttccaggctgcagtgagcgtcatccagaacctgcccaagaacggttcttaccgcccctcctatgaagagatgctgcgattctacagttactacaagcaggccaccatggggccctgcctggtcccccggcccgggttctgggaccccattggacgatataagtgggacgcctggaacagtctgggcaagatgagcagggaggaggccatgtctgcctacatcactgaaatgaaactggtggcacagaaggtgatcgacacagtgcccctgggtgaggtggcagaggacatgtttggttacttcgagcccctgtaccaggtgatccctgacatgccgaggcccccagagaccttcctgagaagggtcacaggttggaaagagcaggttgtgaatggagatgttggggctgtttcagagcctccctgcctccccaaggaaccggcacccccaagcccagagtcccattcacccagggacctggactccgaggttttctgtgattccctggagcagctggagcctgagctggtttggacagagcagcgggcagcatctggaggaaagcgtgatcccaggaacagccccgtgccccccacaaagaaagaggggttgcggggcagcccgccggggccccaggagttggacgtgtggctgctggggacagttcgagcactacaggagagcatgcaggaggtgcaggcgagggtgcagagcctggagagcatgccccggccccctgagcagaggccgcagcccaggcccagtgctcggccatggccccttgggctcccggggcccgcgctgctcttcttcctcctgtggcccttcgtcgtccagtggctcttccgaatgtttcggacccaaaagaggtgactgtcagtggaggggtctctgcagccaactgagactatcttgctgtgccctgagccttcctagggtttagaagaacagcattcaaaattccccgtcctgtcagtgtttgccttcgcacctcctcccctaaagcagcgcggggggcaaataagaccccacccctccctgcagcttcacagggacgcttccttccctccccgcaaccaccccaggctcccctgggaggctgcagttgtggtacacgtccccggtgctgggttggccgtgactcgggggcggggcgatcgggtctcagcccctgccttccccagtctctgggtcacccgaattttcccacccctgcttctccccgaggaggttgagctcttgagcaagttgggacttgggccggggcctggaagaatgattggctgggaggccgcgggagggaggccaggaggcccggaccagttgggaggagtgagcaggccccgggggagggggatgagcgcagtttgctcgctttcctcccctgccggccccctccgcccccacacacactcgggacgtcttcattgaagattcacttacaaaggaatgtttcactaaataaaagaaaaccagaaaaaaaaaaaaaaaa

SEQ ID NO: 165 - DNA, 997 bp, Homo sapiens
  CDS (151)..(909)
taagcttgcggccgccccgacgcttccgttcggtccgtcggcacgtcggccctgcctcccggaccaccctgcggggcgcaccagcgatctggggtgcggggctcggcctccctgcgctcctggctgacggtgtgaccttgggtcttaaccatgaacttctctggaggagggaggcaggaagcagcagggtccaggggtagaagggctcccagaccccgagaacaggaccgagacgtgcagctgtccaaggctctgtcctatgccctgcgccatggggccttgaagctggggcttcccatgggagctgatggcttcgtgcccctgggcaccctcctgcagttgccccagttccgcggcttctctgctgaagatgtgcagcgcgtggtggacaccaataggaagcagcggttcgccctgcagctgggggatcccagcactggccttctcatccgggccaaccagggccattccctgcaggtacctaagttggagctgatgcccctggagacaccgcaggccctgcccccgatgctagtccatggtacattctggaagcactggccatccatcctactcaaaggcctgtcctgccagggaaggacgcacattcacctggccccaggactgcctggagaccccggtatcatcagtggcatgcggtcccattgtgaaatagctgtgttcatcgatggacccctggctctggcagatggaatacccttcttccgctctgccaatggggtgattctgactccagggaatactgatggcttcctccttcccaagtacttcaaggaggccctgcagctacgccctacccgaaagcccctttccttggctggtgatgaagagacagagtgtcagagtagccccaagcacagctccagagaaaggaggaggatccaacaataaaatattaatttataaaaaagaaattttaaaaagtaacaagaaagaactcgtttgaaaccatgtttcatcaaaaaaaaaaaaaaaa

SEQ ID NO: 166 - DNA, 1062 bp, Homo sapiens
  CDS (156)..(947)
agaaggctacatgtgacgagaatgattctgtttcaaatatagccacagaaataaaggagggacaacaatctgggacagtgtctcctcagaaacaatcggcccagaaggttatatttaaaaagaaagtttctcttttgaatattgccacaagaataatgggcggtgggaaatctggaacagtgtcttctcagaaacaaccagcctcaaagactgcaagtgacaagacagattctgctttgaatacagctacagaaataaaggatggactacaatgtgggacagtgtcttctcagaaacaacaagccttgaaggctacaactgacgaggaaggttctgtttctaatatagccacagaaataaaggatggagaaaaatctgggacagtgtcttctcagaaaaaaccagccttgaaggccacaagtgatgagaaagattctttttcgaatataaccagagaaaaaaaggatggagaaatatctaggacagtgtcttctcagaaaccaccagccttgaaggctacaagtgtcaaggaagattctgttttgaatatagccagagaaaaaaaggatggagaaaaatctaggacagtgtcttttgaccaaccaccaggcttgaaggctacaagagacgagaaagattctcttttgaatatagccagaggaaaagaggatggagaaaaaactaggagagtgtcttctcggaaaaaaccagccttgaaggctacaagtgatgagaaagattctttttcgaatataaccagagaaaaaaaggatggagaaacatctaggacagtgtcttctcagaaaccaccagccttgaaggctacaagtgacgaggaagattctgttttgagtatagccagagaagaaaaggatggagaaaaatctaggacagtgtcttctgagcaaccaccaggcttgaagtgtcttctcggaaaaaagcagccttgaaggctacaagtgatgagaaagattctttttcaaatataaccagagaaagaaaggatggagaaacatctaggacagtgtcttctcagaaaccaccagccttgaaggctacaag

SEQ ID NO: 167 - DNA, 1270 bp, Homo sapiens
  CDS (274)..(1170)
tcatcacccgtagcatccggttaagaggctctccacctcgctcattttggtctaactggatttacacaaactcactgtgcacgtgcctggggcgggcaaacccggaaacgacgccgagtcccgcgggatccaggaggagccaactgcgccggaggaggggtttcggccgacacgtcgggattggcggctgcagccaggggtcctccgacgctgggcttccgtgagcggcgctctgccagatctctggaccggattcgtcccattctcgtcctcatggtggacaagaaactggtggtggttttcggaggcacaggtgcccagggtggctccgtggcccgcacactcctggaagatgggacattcaaggttcgagtggtgacccgaaaccctaggaagaaggcagcaaaggagctgaggctgcaaggtgcagaagtagtgcagggagaccaagatgaccaggtcatcatggagctggccctgaatggggcttacgccaccttcatcgtgaccaattactgggagagctgcagccaggagcaggaggtcaagcaggggaagctgctcgctgatctggccaggcgcctgggcctccactatgtggtctacagcggcctggagaacatcaagaagctgacggcagggagattggccgccgcgcactttgacggcaaaggggaggtggaggaatatttccgggacattggcgttcccatgaccagtgtgcggctgccctgctattttgagaacctcctctcccacttcttgccccagaaagccccagacggaaagagctacttgctgagcttgcccacaggtgacgttcccatggatggcatgtccgtgtctgacctgggtcctgtggtgctcagccttttgaagatgccagaaaaatacgtcggccagaacatcgggctgagcacttgcaggcacacggccgaggagtacgctgccctgctcaccaagcacacccgcaaggtcgtgcacgatgccaagatgactcctgaggactacgaaaagcttggctttcccggtgcccgggacctggccaacatgttccgtttctatgccctgagacccgaccgtgacatcgagctgaccctgagactcaaccccaaggccctgacgctggaccagtggctggaacagcacaaaggggacttcaacctgctgtgacctgcccgcctcgcggccccttgtggggatcgggggcaccagaggggcagaggcaccaacatctgaataaagccattgttctcccaaaaaaaaaaaa

SEQ ID NO: 168 - DNA, 3053 bp, Homo sapiens
  CDS (454)..(2799)
  misc_feature (1)...(3053): n = a,t,c or g
gggaaacggacaacattcgttttgagcaaaagaagtagagtatatctgcaatactgaagaaaaaaatgttctttaaaactatgaagtggttaatgggattaaagtattcaaggaatgagatggaaatcctggtaatgggtagaaacataggtaaattctcctttcccacttaccaccaacctgtgtgaacaacaatcatttctcattaatagtcaagaatgtgaagagatcatgagtanaaagtcttgatcagaaattgtgtatagctgtgtccagcataaaaccttatataaaatgcatattcatagaagatgctcaagtatgtcatgaaaaatatgaagtttatttaaatatttatccaaattaaagatttnctgtattctctaaaaaaaaaaaaaaaaaaaaaaaaaaaaaaagcctcgtgccgaattcggcacgagggctgtcgccaccatggctccgcaccgccccgcgcccgcgctgctttgcgcgctgtccctggcgctgtgcgcgctgtcgctgcccgtccgcgcggccactgcgtcgcggggggcgtcccaggcgggggcgccccaggggcgggtgcccgaggcgcggcccaacagcatggtggtggaacaccccgagttcctcaaggcagggaaggagcctggcctgcagatctggcgtgtggagaagttcgatctggtgcccgtgcccaccaacctttatggagacttcttcacgggcgacgcctacgtcatcctgaagacagtgcagctgaggaacggaaatctgcagtatgacctccactactggctgggcaatgagtgcagccaggatgagagcggggcggccgccatctttaccgtgcagctggatgactacctgaacggccgggccgtgcagcaccgtgaggtccagggcttcgagtcggccaccttcctaggctacttcaagtctggcctgaagtacaagaaaggaggtgtggcatcaggattcaagcacgtggtacccaacgaggtggtggtgcagagactcttccaggtcaaagggcggcgtgtggtccgtgccaccgaggtacctgtgtcctgggagagcttcaacaatggcgactgcttcatcctggacctgggcaacaacatccaccagtggtgtggttccaacagcaatcggtatgaaagactgaaggccacacaggtgtccaagggcatccgggacaacgagcggagtggccgggcccgagtgcacgtgtctgaggagggcactgagcccgaggcgatgctccaggtgctgggccccaagccggctctgcctgcaggtaccgaggacaccgccaaggaggatgcggccaaccgcaagctggccaagctctacaaggtctccaatggtgcagggaccatgtccgtctccctcgtggctgatgagaaccccttcgcccagggggccctgaagtcagaggactgcttcatcctggaccacggcaaagatgggaaaatctttgtctggaaaggcaagcaggcaaacacggaggagaggaaggctgccctcaaaacagcctctgacttcatcaccaagatggactaccccaagcagactcaggtctcggtccttcctgagggcggtgagaccccactgttcaagcagttcttcaagaactggcgggacccagaccagacagatggcctgggcttgtcctacctttccagccatatcgccaacgtggagcgggtgcccttcgacgccgccaccctgcacacctccactgccatggccgcccagcacggcatggatgacgatggcacaggccagaaacagatctggagaatcgaaggttccaacaaggtgcccgtggaccctgccacatatggacagttctatggaggcgacagctacatcattctgtacaactaccgccatggtggccgccaggggcagataatctataactggcagggtgcccagtctacccaggatgaggtcgctgcatctgccatcctgactgctcagctggatgaggagctgggaggtacccctgtccagagccgtgtggtccaaggcaaggagcccgcccacctcatgagcctgtttggtgggaagcccatgatcatctacaagggcggcacctcccgcgagggcgggcagacagcccctgccagcacccgcctcttccaggtccgcgccaacagcgctggagccacccgggctgttgaggtattgcctaaggctggtgcactgaactccaacgatgcctttgttctgaaaaccccctcagccgcctacctgtgggtgggtacaggagccagcgaggcagagaagacgggggcccaggagctgctcagggtgctgcgggcccaacctgtgcaggtggcagaaggcagcgagccagatggcttctgggaggccctgggcgggaaggctgcctaccgcacatccccacggctgaaggacaagaagatggatgcccatcctcctcgcctctttgcctgctccaacaagattggacgttttgtgatcgaagaggttcctggtgagctcatgcaggaagacctggcaacggatgacgtcatgcttctggacacctgggaccaggtctttgtctgggttggaaaggattctcaagaagaagaaaagacagaagccttgacttctgctaagcggtacatcgagacggacccagccaatcgggatcggcggacgcccatcaccgtggtgaagcaaggctttgagcctccctcctttgtgggctggttccttggctgggatgatgattactggtctgtggaccccttggacagggccatggctgagctggctgcctgaggaggggcagggcccacccatgtcaccggtcagtgccttttggaactgtccttccctcaaagaggccttagagcgagcagagcagctctgctatgagtgtgtgtgtgtgtgtgtgttgtttcttttttttttttttacagtatccaaaaatagccctgcaaaaattcagagtccttgcaaaattgtctaaaatgtcagtgtttgggaaattaaatccaataaaaacattttgaagtgtgaaaaaaaaaaaa

SEQ ID NO: 169 - DNA, 1029 bp, Homo sapiens
  CDS (41)..(805)
cacgggctttccacagcgcgggggaacgggaggctgcaggatggtcaagctgacggcggagctgatcgagcaggcggcgcagtacaccaacgcggtgcgcgaccgggagctggacctccgggggtataaaattcccgtcattgaaaatctaggtgctacgttagaccagtttgatgctattgatttttctgacaatgagatcaggaaactggatggttttcctttgttgagaagactgaaaacattgttagtgaacaacaacagaatatgccgtataggtgagggacttgatcaggctctgccctgtctgacagaactcattctcaccaataatagtctcgtggaactgggtgatctggaccctctggcatctctcaaatcgctgacttacctaagtatcctaagaaatccggtaaccaataagaagcattacagattgtatgtgatttataaagttccgcaagtcagagtactggatttccagaaagtgaaactaaaagagcgtcaggaagcagagaaaatgttcaagggcaaacggggtgcacagcttgcaaaggatattgccaggagaagcaaaacttttaatccaggtgctggtttgccaactgacaaaaagaaaggtgggccatctccaggggatgtagaagcaatcaagaatgccatagcaaatgcttcaactctggctgaagtggagaggctgaaggggttgctgcagtctggtcagatccctggcagagaacgcagatcagggcccactgatgatggtgaagaagagatggaagaagacacagtcacaaacgggtcctgagcagtgaggcagatgtataataataggccctcttggaacaagtcttgcttttcgaacatggtataatagccttgtttgtgttagcaaagtggaatctatcagcattgttgaaatgcttaagactgctgctgataattttgtaatataagttttgaaatctaaatgtcaattttctacaaattataaaaataaactccactcactatgctaaaaaaaaaaaa

SEQ ID NO: 170 - DNA, 2641 bp, Homo sapiens
  CDS (195)..(1004)
cccaggcgcagccaatgggaagggtcggaggcatggcacagccaatgggaagggccggggcaccaaagccaatgggaagggccgggagcgcgcggcgcgggagatttaaaggctgctggagtgaggggtcgcccgtgcaccctgtcccagccgtcctgtcctggctgctcgctctgcttcgctgcgccgccactatgctctccctccgtgtcccgctcgcgcccatcacggacccgcagcagctgcagctctcgccgctgaaggggctcagcttggtcgacaaggagaacacgccgccggccctgagcgggacccgcgtcctggccagcaagaccgcgaggaggatcttccaggagcccacggagccgaaaactaaagcagctgcccccggcgtggaggatgagccgctgctgagagaaaacccccgccgctttgtcatcttccccatcgagtaccatgatatctggcagatgtataagaaggcagaggcttccttttggaccgccgaggaggtggacctctccaaggacattcagcactgggaatccctgaaacccgaggagagatattttatatcccatgttctggctttctttgcagcaagcgatggcatagtaaatgaaaacttggtggagcgatttagccaagaagttcagattacagaagcccgctgtttctatggcttccaaattgccatggaaaacatacattctgaaatgtatagtcttcttattgacacttacataaaagatcccaaagaaagggaatttctcttcaatgccattgaaacgatgccttgtgtcaagaagaaggcagactgggccttgcgctggattggggacaaagaggctacctatggtgaacgtgttgtagcctttgctgcagtggaaggcattttcttttccggttcttttgcgtcgatattctggctcaagaaacgaggactgatgcctggcctcacattttctaatgaacttattagcagagatgaggggtttacactgtgattttgcttgcctgatgttcaaacacctggtacacaaaccatcggaggagagagtaagagaaataattatcaatgctgttcggatagaacaggagttcctcactgaggccttgcctgtgaagctcattgggatgaattgcactctaatgaagcaatacattgagtttgtggcagacagacttatgctggaactgggttttagcaaggttttcagagtagagaacccatttgactttatggagaatatttcactggaaggaaagactaacttctttgagaagagagtaggcgagtatcagaggatgggagtgatgtcaagtccaacagagaattcttttaccttggatgctgacttctaaatgaactgaagatgtgcccttacttggctgattttttttttccatctcataagaaaaatcagctgaagtgttaccaactagccacaccatgaattgtccgtaatgttcattaacagcatctttaaaactgtgtagctacctcacaaccagtcctgtctgtttatagtgctggtagtatcaccttttgccaaaaggcctggctggctgtgacttaccatagcagtgacaatggcagtcttggctttaaagtgaggggtgaccctttagtgagcttagcacagcgggattaaacagtcctttaaccagcacagccagttaaaagatgcagcctcactgcttcaacgcagattttaatgtttacttaaatataaacctggcactttacaaacaaataaacattgtttgtactcacaaggcgataatagcttgatttatttggtttctacaccaaatacattctcctgaccactaatgggagccaattcacaattcactaagtgactaaagtaagttaaacttgtgtagactaagcatgtaatttttaagttttattttaatgaattaaaatatttgttaaccaactttaaagtcagtcctgtgtatacctagatattagtcagttggtgccagatagaagacaggttgtgtttttatcctgtggcttgtgtagtgtcctgggattctctgccccctctgagtagagtgttgtgggataaaggaatctctcagggcaaggagcttcttaagttaaatcactagaaatttaggggtgatctgggccttcatatgtgtgagaagccgtttcattttatttctcactgtattttcctcaacgtctggttgatgagaaaaaattcttgaagagttttcatatgtgggagctaaggtagtattgtaaaatttcaagtcatccttaaacaaaatgatccacctaagatcttgcccctgttaagtggtgaaatcaactagaggtggttcctacaagttgttcattctagttttgtttggtgtaagtaggttgtgtgagttaattcatttatatttactatgtctgttaaatcagaaattttttattatctatgttcttctagattttacctgtagttcatacttcagtcacccagtgtcttattctggcattgtctaaatctgagcattgtctagggggatcttaaactttagtaggaaaccatgagctgttaatacagtttccattcaaatattaatttcagaatgaaacataatttttttttttttttttgaaatggagtctcct

SEQ ID NO: 171 - DNA, 280 bp, Homo sapiens
  CDS (39)..(227)
actactaaattcgcggccgcgtcgacctgtgaagaaacatggcggccgcgacgttgacttcgaaattgtactccctgctgttccgcaggacctccaccttcgccctcaccatcatcgtgggcgtcatgttcttcgagcgcgccttcgatcaaggcgcggacgctatctacgaccacatcaacgaggggaagctgtggaaacacatcaagcacaagtatgagaacaagtagttccttggaggcccccatccaggccagaaggaccaggtccacccagcagc

SEQ ID NO: 172 - DNA, 2769 bp, Homo sapiens
  CDS (136)..(1032)
cagtggcggaattctagccaccggtgtctccttctacatccgcctctgcgccggctgccacccgcgctccctccgccgccgccgccttgctgctgctcaaagctgctgccgccccttgggctaaaaggttttcaaatggaacattttgatgcatcacttagtacctatttcaaggcattgctaggccctcgagatactagagtaaaaggatggtttcttctggacaattatatacccacatttatctgctctgtcatatatttactaattgtatggctgggaccaaaatacatgaggaataaacagccattctcttgccgggggattttagtggtgtataaccttggactcacactgctgtctctgtatatgttctgtgagttagtaacaggagtatgggaaggcaaatacaacttcttctgtcagggcacacgcaccgcaggagaatcagatatgaagattatccgtgtcctctggtggtactacttctccaaactcatagaatttatggacactttcttcttcatcctgcgcaagaacaaccaccagatcacggtcctgcacgtctaccaccatgcctcgatgctgaacatctggtggtttgtgatgaactgggtcccctgcggccactcttattttggtgccacacttaatagcttcatccacgtcctcatgtactcttactatggtttgtcgtcagtcccttccatgcgtccatacctctggtggaagaagtacatcactcaggggcagctgcttcagtttgtgctgacaatcatccagaccagctgcggggtcatctggccgtgcacattccctcttggttggttgtatttccagattggatacatgatttccctgattgctctcttcacaaacttctacattcagacctacaacaagaaaggggcctcccgaaggaaagaccacctgaaggaccaccagaatgggtccatggctgctgtgaatggacacaccaacagcttttcacccctggaaaacaatgtgaagccaaggaagctgcggaaggattgaagtcaaagaattgaaaccctccaaaccacgtcatctgattgtaagcacaatatgagttgtgccccaatgctcgttaacagctgctgtaactagtctggcctacaatagtgtgattcatgtaggacttctttcatcaattcaaaacccctagaaaacgtatacagattatataagtagggataagatttctaacatttctgggctctctgacccctgcgctagactgtggaaagggagtattattatagtatacaacactgctgttgccttattagttataacatgataggtgctgaattgtgattcacaatttaaaaacactgtaatccaaacttttttttttaactgtagatcatgcatgtgattgtaaatgtaaatttgtacaatgttgttatggtagagaaacacacatgccttaaaatttaaaaagcagggcccaaagcttattagtttaaattagggtatgtttcaagtttgtattaatttgtaatagctctgtttagaaaaaatcaaagaccatgatttatgaaactaatgtgacataatttccagtgacttgttgatgtgaaatcagacacggcaccttcagttttgtactattggctttgaatcaagcaggctcaaatctagtggaacagtcagtttaactttttaacagatcttatttttttattttgagtgccactattaatgtaaaaaggggggggctctacagcagtcgtgatgaaacttaaatatatattctttgtcctcgagattttaggaagggtgtagggtgagtaggccatttttaatttctgaagtgctaagtgtttttatacagcaaacaaaaagtcaattttgctttccaccagtgcgagagaggatgtatacttttcaagagagatgattgcctatttaccgtttgacagagtcccgtagatgagcaatggggaactggttgccagggtctaaatttggattgatttatgcactgttatctgttttgacacagatttccttgtaaaatgtgcctagtttaccaaaattaacaaagggggggaaaggaccttagaactttttaaggtaaaatcaaatatagctacagcataagagaatcgagaaatttgatagaggtaacttgtttaatgtaaatctaatagtacttgtaatttctttctgcttagaatctaaagatgtgtttagaacctcttgtttaaaaataatagactgcttatcataaaatcacatctcacacatttgaggcagtggtcaaacaggtaaagcctatgatgtgtgtcattttaaagtgtcggaatttagcctctgaataccttctccattgggggaaagatattcttggaaccactcatgacatatcttagaaggtcattgacaatgtataaactaattgttggtttgatatttatgtaaatatcagtttaccatgctttaattttgcacattcgtactatagggagcctattggttctctattagtcttgtgggttttctgtttgaaaaggagtcatggcatctgtttacatttaccttatcaaacctagaatgtgtatatttataaatgtatgtcttcattgctaggtactaatttgcagatgtctttacatatttcaatacagaaactataacattcaatagtgtgctgtcaaagtgtgcttagctcacctggatatacctacattgttaaatgtctaaacagtaatcattaaaacatttttgattaaaaaaaaaaaa

SEQ ID NO: 173 - protein, 227 aa, Homo sapiens
MAGVGAGPLRAMGRQALLLLALCATGAQGLYFHIGETEKRCFIEEIPDETMVIGNYRTQMWDKQKEVFLPSTPGLGMHVEVKDPDGKVVLSRQYGSEGRFTFTSHTPGDHQICLHSNSTRMALFAGGKLRVHLDIQVGEHANNYPEIAAKDKLTELQLRARQLLDQVEQIQKEQDYQRYREERFRLTSESTNQRVLWWSIAQTVILILTGIWQMRHLKSFFEAKKLV

SEQ ID NO: 174 - protein, 523 aa, Homo sapiens
MVAGESEKGEAQELLKTRLNQGSGPTLGTQAAIFKTAMPLNHREDRSQEAIITCSEDFRVSNVTSGCQNLPLTRRRPTGSCVCLGRGGPGGGGLRAGSRHPAPAAMHPRRPDGFDGLGYRGGARDEQGFGGAFPARSFSTGSDLGHWVTTPPDIPGSRNLHWGEKSPPYGVPTTSTPYEGPTEEPFSSGGGGSVQGQSSEQLNRFAGFGIGLASLFTENVLAHPCIVLRRQCQVNYHAQHYHLTPFTVINIMYSFNKTQGPRALWKGMGSTFIVQGVTLGAEGIISEFTPLPREVLHKWSPKQIGEHLLLKSLTYVVAMPFYSASLIETVQSEIIRDNTGILECVKEGIGRVIGMGVPHSKRLLPLLSLIFPTVLHGVLHYIISSVIQKFVLLILKRKTYNSHLAESTSPVQSMLDAYFPELIANFAASLCSDVILYPLETVLHRLHIQGTRTIIDNTDLGYEVLPINTQYEGMRDCINTIRQEEGVFGFYKGFGAVIIQYTLHAAVLQITKIIYSTLLQNNI

SEQ ID NO: 175 - protein, 480 aa, Homo sapiens
MATVPGLQPLPTLEQDLEQEEILIVKVEEDFCLEEEPSVETEDPSPETFRQLFRLFCYQEVAGPREALSRLWELCCRWLRPELRTKEQILELLVLEQFLTVLPGEIQARVREQQPESGEEAVVLVEGLQRKPRKHRQRGSELLSDDEVPLGIGGQFLKHQAEAQPEDLSLEEEARFSSQQPPAQLSHRPQRGPLLWPERGPPAPRHQEMASASPFLSAWSQVPVNLEDVAVYLSGEEPRCMDPAQRDAPLENEGPGIQLEDGGDGREDAPLRMEWYRVLSARCQGPGHPLPGQRPAPVRGLVRPDQPRGGPPPGRRASHGADKPYTCPECGKGFSKTSHLTKHQRTHTGERPYKCLVCGKGFSDRSNFSTHQRVHTGEKPYPCPECGKRFSQSSSLVIHRRTHSGERPYACTQCGKRFNNSSHFSAHRRTHTGEKPYTCPACGRGFRRGTDLHKHQRTHMGAGSLPTLQPVAPGGPGAKA

SEQ ID NO: 176 - protein, 1820 aa, Homo sapiens
MHGKDQRLVRSQHVEGCCKRIGFDGGSQLVIVNFPWPAIMLLIFFIMLLIFFAKPFEPPLCLSMPTSETESVNTENVAGGDIEGENCGARLADSEVRALSPAGHPFHSDKCDLGEKQPEECEKSLKGIQNRAEWEVDLVSSELLKDHCDVRKRAGRNEKLQEPDTAFSPSSLFFKNPLNLSHRISKSKFSRYWRRWNRFCRRKCRAAVKSNVFYWLVIFLVFLNTLTIASEHYNQPNWLTEVQDTANKALLALFTAEMLLKMYSLGLQAYFVSLFNRFDCFVVCGGILETILVETKIMSPLGISVLRCVRLLRIFKITRYWNSLSNLVASLLNSVRSIASLLLLLFLFIIIFSLLGMQLFGGKFNFDEMQTRRSTFDNFPQSLLTVFQILTGEDWNSVMYDGIMAYGGPSFPGMLVCIYFIILFICGNCILCCCPPPLRPPAPSLQHSAKRARPSEWTQTDILLNVFLAIAVDNLADAESLTSAQKEEEEEKERKKLARTASPEKKQELVEKPAVGESKEEKIELKSITADGESPPATKINMDDLQPNENEDKSPYPNPETTGEEDEEEPEMPVGPRPRPLSELHLKEKAVPMPEASAFFIFSSNNRFRLQCHRIVNDTIFTNLILFFILLSSISLAAEDPVQHTSFRNHILFYFDIVFTTIFTIEIALKILGNADYVFTSIFTLEIILKDTQVPPAAIPGWKHPSKGPFPSNGVELGKQDRGGWQSEKKGQRGTISTGYLSLAFPDALNTTDDFQMTAYGAFLHKGSFCRNYFNILDLLVVSVSLISFGIQSSAINVVKILRVLRVLRPLRAINRAKGLKHVVQCVFVAIRTIGNIVIVTTLLQFMFACIGVQLFKGKLYTCSDSSKQTEAECKGNYITYKDGEVDHPIIQPRSWENSKFDFDNVLAAMMALFTVSTFEGWPDMSHDVRDLCHYPYGIWELGVGRASPGVGPVVTIGFKIATPSMPFIGLLYRSIDSHTEDKGPIYNYRVEISIFFIIYIIIIAFFMMNIFVGFVIVTFQEQGEQEYKNCELDKNQRQCVEYALKARPLRRYIPKNQHQYKVWYVVNSTYFEYLMFVLILLNTICLAMQHYGQSCLFKIAMNILNMLFTGLFTVEMILKLIAFKPKERGNEGSEALALSASQRVERQKEERFLRSPTCCPEESINEALGTSFIEIVLERLSDDVEAWYHLYRAHRVVRETPIHNKQRFQMGSLSLSGVVCRKRKQRWKAKTVAPEPPSVPCSAGLSSMATQPALRGSEELDSRGLVCHFKESQENPFSNPLLLNHLGHSHQRNKGQQGYFSDPWNVFDFLIVIGSIIDVILSETNLCPALPGWGVELSRGSGGAGDTPPGSPGRPQPHATFELTQLLSGLCTLRKPGYPGLSCQNCRVHYFCDAWNTFDALIVVGSIVDIAITEVNMVPKAPALEKKKRQEAEERRGLGQGLWREEIGTRKLLFIWEMPLNNCQVSQEDRLQAPSKTTDGRNYKLTQGTGSKSGKGSEINGPSIDGYQQILNLHPKNAEENSRISITFFRLFRVMRLVKLLSRGEGIRTLLWTFIKSFQALPYVALLIVMLFFIYAVIGMQVFGKIALNDTTEINRNNNFQTFPQAVLLLFRCATGEAWQDIMLACMPGKKCAPESEPSNSTEGETPCGSSFAVFYFISFYMLCAFLIINLFVAVIMDNFDYLTRDWSILGPHHLDEFKRIWAEYDPEAKGRIKHLDVVTLLRRIQPPLGFGKLCPHRVACKRLVSMNMPLNSDGTVMFNATLFALVRTALRIKTEAFHETLGLILGGILKSEGIAHKTEGDGCYLKQDQPLSKRTYTG

SEQ ID NO: 177 - protein, 85 aa, Homo sapiens
MLFCLCLLFIVCKIGWTANRRMRAAQPGLTFFQLIHKQGDMQGAEGPWDVTNSAFLWRLYDQTANCLSRMQDMGKLTLPCHQKVC

SEQ ID NO: 178 - protein, 163 aa, Homo sapiens
MPSIKLQSSDGEIFEVDVEIAKQSVTIKTMLEDLGMDDEGDDDPVPLPNVNAAILKKVIQWCTHHKDDPPPPEDDENKEKRTDDIPVWDQEFLKVDQGTLFELILAANYLDIKGLLDVTCKTVANMIKGKTPEEIRKTFNIKNDFTEEEEAQVRKENQWCEEK

SEQ ID NO: 179 - protein, 150 aa, Homo sapiens
MTKHPPNRRGISFEVGAQLEARDRLKNWYPAHIEDIDYEEGKVLIHFKRWNHRYDEWFCWDSPYLRPLEKIQLRKEGLHEEDGSSEFQINEQVLACWSDCRFYPAKVTAVNKDGTYTVKFYDGVVQTVKHIHVKAFSKDQVRNVVLCFVL

SEQ ID NO: 180 - protein, 396 aa, Homo sapiens
MSVAFASARPRGKGEVTQQTIQKMLDENHHLIQCILEYQSKGKTAECTQYQQILHRNLVYLATIADSNQNMQSLLPAPPTQNMNLGPGALTQSGSSQGLHSQGSLSDAISTGLPPSSLLQGQIGNGPSHVSMQQTAPNTLPTTSMSISGPGYSHAGPASQGVPMQGQGTIGNYVSRTNINMQSNPVSMMQQQAATSHYSSAQGGSQHYQGQSSIAMMGQGSQGSSMMGQRPMAPYRPSQQGSSQQYLGQEEYYGEQYSHSQGAAEPMGQQYYPDGHGDYAYQQSSYTEQSYDRSFEESTQHYYEGGNSQYSQQQAGYQQGAAQQQTYSQQQYPSQQSYPGQQQGYGSAQGAPSQYPGYQQGQGQQYGSYRAPQTAPSAQQQRPYGYEQGQYGNYQQ

SEQ ID NO: 181 - protein, 329 aa, Homo sapiens
MEKLLKLDVNASRQGIEDAEETATQTCGGTDSTEGLFNMDEDEETEHETKAGPERLDQMVHPVAERLDILMSLVLSYMKDVCYVDGKVDNGKTKDLYRDLINIFDKLLLPTHASCHVQFFMFYLCSFKLGFAEAFLEHLWKKLQDPSNPAIIRQAAGNYIGSFLARAKFIPLITVKSCLDLLVNWLHIYLNNQDSGTKAFCDVALHGPFYSACQAVFYTFVFRHKQLLSGNLKEGLQYLQSLNFERIVMSQLNPLKICLPSVVNFFAAITNKYQLVFCYTIIERNNRQMLPVIRSTTGGDSVQTCTNPLDTFVPFDPCVLKRPAFRLLP

SEQ ID NO: 182 - protein, 80 aa, Homo sapiens [sequence omitted]

SEQ ID NO: 183 - protein, 929 aa, Homo sapiens
MTKKRKRQHDFQKVKLKVGKKKPKLQNATPTNFKTKTIHLPEQLKEDGTLPTNNRKLNIKDLLSQMHHYNAGVKQSALLGLKDLLSQYPFIIDAHLSNILSEVTAVFTDKDANVRLAAVQLLQFLAPKIRAEQISPFFPLVSAHLSSAMTHITEGIQEDSLKVLDILLEQYPALITGRSSILLKNFVELISHQQLSKGLINRDRSQSWILSVNPNRRLTSQQWRLKVLVRLSKFLQALADGSSRLRESEGLQEQKENPHATSNSIFINWKEHANDQQHIQVYENGGSQPNVSSQFRLRYLVGGLSGVDEGLSSTENLKGFIEIIIPLLIECWVEAVPPQLATPVGNGIEREPLQVMQQVLNIISLLWKLSKQQDETHKLESWLRKNYLIDFKHHFMSRFPYVLKEITKHKRKEPNKSIKHCTVLSNNIDHLLLNLTLSDIMVSLANASTLQKDCSWIEMIRKFVTETLEDGSRLNSKQLNRLLGVSWRLMQIQPNREDTETLIKAVYTLYQQRGLILPVRTLLLKFFSKIYQTEELRSCRFRYRSKVLSRWLAGLPLQLAHLGSRNPELSTQLIDIIHTAAARANKELLKSLQATALRIYDPQEGAVVVLPADSQQRLVQLVYFLPSLPADLLSRLSRCCIMGRLSSSLAAMLIGILHMRSSFSGWKYSAKDWLMSDVDYFSFLFSTLTGFSKEELTWLQSLRGVPHVIQTQLSPVLLYLTDLDQFLHHWDVTEAVFHSLLVIPARSQNFDILQSAISKHLVGLTVIPDSTAGCVFGVICKLLDHTCVVSETLLPFLASCCYSLLYFLLTIEKGEAEHLRKRDKLWGVCVSILALLPRVLRLMLQSLRVNRVGPEELPVVGQLLRLLLQHAPLRTHMLTNAILVQQIIKNITTLKSGSVQEQWLTDLHYCFNVYITGHPQGPSALATVY

SEQ ID NO: 184 - protein, 575 aa, Homo sapiens
MDPEDEGVAGVMSVGPPAARLQEPVTFRDVAVDFTQEEWGQLDPTQRILYRDVMLETFGHLLSIGPELPKPEVISQLEQGTELWVAERGTTQGCHPAWEPRSESQASRKEEGLPEEEPSHVTGREGFPTDAPYPTTLGKDRECQSQSLALKEQNNLKQLEFGLKEAPVQDQGYKTLRLRENCVLSSSPNPFPEISRGEYLYTYDSQITDSEHNSSLVSQQTGSPGKQPGENSDCHRDSSQAIPITELTKSQVQDKPYKCTDCGKSFNHNAHLTVHKRIHTGERPYMCKECGKAFSQNSSLVQHERIHTGDKPYKCAECGKSFCHSTHLTVHRRIHTGEKPYECQDCGRAFNQNSSLGRHKRTHTGEKPYTCSVCGKSFSRTTCLFLHLRTHTEERPYECNHCGKGFRHSSSLAQHQRKHAGEKPFECRQRLIFEQTPALTKHEWTEALGCDPPLSQDERTHRSDRPFKCNQCGKCFIQSSHLIRHQITHTREEQPHGRSRRREQSSSRNSHLVQHQHPNSRKSSAGGAKAGQPESRALALFDIQKIMQEKNPVHVIGVEEPSVGASMLFDIREST

SEQ ID NO: 185 - protein, 484 aa, Homo sapiens
MIVSYDEHEVNNTFKFGVIYQKARQTLEEELFGNNEESPAFKEFLDLLGDTITLQDFKGFRGGLDVTHGQTGVESVYTTFRDREIMFHVSTKLPFTDGDAQQLQRKRHIGNDIVAIIFQEENTPFVPDMIASNFLHAYIVVQVETPGTETPSYKVSVTAREDVPTFGPPLPSPPVFQKGPEFREFLLTKLTNAENACCKSDKFAKLEDRTRAALLDNLHDELHAHTQAMLGLGPEEDKFENGGHGGFLESFKRAIRVRSHSMETMVGGQKKSHSGGIPGSLSGGISHNSMEVTKTTFSPPVVAATVKNQSRSPIKRRSGLFPRLHTGSEGQGDSRARCDSTSSTPKTPDGGHSSQEIKSETSSNPSSPEICPNKEKPFMKLKENGRAISRSSSSTSSVSSTAGEGEAMEEGDSGGSQPSTTSPFKQEVFVYSPSPSSESPSLGAAATPIIMSRSPTDAKSRNSPRSNLKFRFDKLSHASSGAGH

SEQ ID NO: 186 - protein, 363 aa, Homo sapiens
MASGDFCSPGEGMEILQQVCSKQLPPCNLSKEDLLQNPYFSKLLLNLSQHVDESGLSLTLAKEQAQAWKEVRLHKTTWLRSEILHRVIQELLVDYYVKIQDTNVTSEDKKFHETLEQRLLVTELMRLLGPSQEREIPPLLGLEKADLLELMPLSEDFVWMRARLQQEVEEQLKKKCFTLLCYYDPNSDADSETVKAAKVWKLAEVLVGEQQQCQDAKSQQKEQMLLLEKKSAAYSQVLLRCLTLLQRLLQEHRLKTQSELDRINAQYLEVKCGAMILKLRMEELKILSDTYTVEKVEVHRLIRDRLEGAIHLQEQDMENSRQVLNSYEVLGEEFDRLVKEYTVLKQATENKRWALQEFSKVYR

SEQ ID NO: 187 - protein, 95 aa, Homo sapiens
MNVKVGRWSQVVFRPFICKQLFYLCVYLSVCLSIYLSIYLSIYLSIYLSIYLSIYLFYFLRWSLALSSELECSGVISAHCKLRLPGSTNSPTSAS

SEQ ID NO: 188 - protein, 233 aa, Homo sapiens [sequence omitted]

SEQ ID NO: 189 - protein, 213 aa, Homo sapiens
MHQQKRQPELVEGNLPVFVFPTELIFYADDQSTHKQVLTLYNPYEFALKFKVLCTTPNKYVVVDAAGAVKPQCCVDIVIRHRDVRSCHYGVIDKFRLQVSEQSQRKALGRKEVVATLLPSAKEQQKEEEEKRLKEHLTESLFFEQSFQPENRAVSSGPSLLTVFLGVVCIAALMLPTLGDVESLVPLYLHLSVNQKLVAAYILGLITMAILRT

SEQ ID NO: 190 - protein, 474 aa, Homo sapiens
MISFCPDCGKSIQAAFKFCPYCGNSLPVEEHVGSQTFVNPHVSSFQGSKRGLNSSFETSPKKVKWSSTVTSPRLSLFSDGDSSESEDTLSSSERSKGSGSRPPTPKSSPQKTRKSPQVTRGSPQKTSCSPQKTRQSPQTLKRSRVTTSLEALPTGTVLTDKSGRQWKLKSFQTRDNQGILYEAAPTSTLTCDSGPQKQKFSLKLDAKDGRLFNEQNFFQRAAKPLQVNKWKKLYSTPLLAIPTCMGFGVHQDKYRFLVLPSLGRSLQSALDVSPKHVLSERSVLQVACRLLDALEFLHENEYVHGNVTAENIFVDPEDQSQVTLAGYGFAFRYCPSGKHVAYVEGSRSPHEGDLEFISMDLHKGCGPSRRSDLQSLGYCMLKWLYGFLPWTNCLPNTEDIMKQKQKFVDKPGPFVGPCGHWIRPSETLQKYLKVVMALTYEEKPPYAMLRNNLEALLQDLRVSPYDPIGLPMVP

SEQ ID NO: 191 - protein, 368 aa, Homo sapiens
MCSLPRGFEPQAPEDLAQRSLVELREMLKRQERLLRNEKFICKLPDKGKKIFDSFAKLKAAIAECEEVRRKSELFNPVSLDCKLRQKAIAEVDVGTDKAQNSDPILDTSSLVPGCSSVDNIKSSQTSQNQGLGRPTLEGDEETSEVEYTVNKGPASSNRDRVPPSSEASEHHPRHRVSSQAEDTSSSFDNLFIDRLQRITIADQGEQQSEENASTKNLTGLSSGTEKKPHYMEVLEMRAKNPVPQLRKFKTNVLPFRQNDSSSHCQKSGSPISSEERRRRDKQHLDDITAARLLPLHHMPTQLLSIEESLALQKQQKQNYEEMQAKLAAQKLAERLNIKMRSYNPEGESSGRYREVRDEDDDWSSDEF

SEQ ID NO: 192 - protein, 51 aa, Homo sapiens
MSHRIFFFCYLKAKIKILGWARWLVPVIPALWEAEVGRSFEARSSRTAWAT

SEQ ID NO: 193 - protein, 199 aa, Homo sapiens
MACNIPNQRQRTLSTTGEALYEILGLHKGASNEEIKKTYRKLALKHHPDKNPDDPAATEKFKEINNAHAILTDISKRSIYDKYGSLGLYVAEQFGDENVNTYFMLSSWWAKALFVIVGLLTGCYFCCCLCCCCNCCCGHCRPESSVPEEDFYVSPEDLEEQIKSDMEKDVDFPVFLQPTNANEKTQLIKEGSRSYCTDS

SEQ ID NO: 194 - protein, 471 aa, Homo sapiens
MRGSPGDAERRQRWGRLFEELDSNKDGRVDVHELRQGLARLGGGNPDPGAQQGISSEGDADPDGGLDLEEFSRYLQEREQRLLLMFHSLDRNQDGHIDVSEIQQSFRALGISISLEQAEKILHSMDRDGTMTIDWQEWRDHFLLHSLENVEDVLYFWKHSTVLDIGECLTVPDEFSKQEKLTGMWWKQLVAGAVAGAVSRTGTAPLDRLKVFMQVHASKTNRLNILGGLRSMVLEGGIRSLWRGNGINVLKIAPESAIKFMAYEQIKRAILGQQETLHVQERFVAGSLAGATAQTIIYPMEVLKTRLTLRRTGQYKGLLDCARRILEREGPRAFYRGYLPNVLGIIPYAGIDLAVYETLKNWWLQQYSHDSADPGILVLLACGTISSTCGQIASYPLALVRTRMQAQASIEGGPQLSMLGLLRHILSQEGMRGLYRGIAPNFMKVIPAVSISYVVYENMKQALGVTSRSFC

SEQ ID NO: 195 - protein, 164 aa, Homo sapiens [sequence omitted]

SEQ ID NO: 196 - protein, 259 aa, Homo sapiens
MKLNERSVAHYALSDSPADHMGFLRTWGGPGTPPTPSGTGRRCWFVLKGNLLFSFESREGRAPLSLVVLEGCTVELAEAPVPEEFAFAICFDAPGVRPHLLAAEGPAAQEAWVKVLSRASFGYMRLVVRELESQLQDARQSLALQRRSSWKFVASRCKPQAPNHRAAGLENGHCLSKDSSPVGLVEEGGSRSAGWGLAEWELQGPASLLLGKGQSPVSPETSCFSTLHDWYGQEIVELRQCWQKRAQGSHSKCEEQDRP

SEQ ID NO: 197 - protein, 47 aa, Homo sapiens [sequence omitted]

SEQ ID NO: 198 - protein, 140 aa, Homo sapiens [sequence omitted]

SEQ ID NO: 199 - protein, 174 aa, Homo sapiens
MAAANKGNKPRVRSIRFAAGHDAEGSHSHVHFDEKLHDSVVMVTQESDSSFLVKVGFLKILHRYEITFTLPPVHRLSKDVREAPVPSLHLKLLSVVPVPEGYSVKCEYSAHKEGVLKEEILLACEGGTGTCVRVTVQARVMDRHHGTPMLLDGVKCVGAELEYDSEHSDWHGFD

SEQ ID NO: 200 - protein, 236 aa, Homo sapiens
MMEKKKPCKYSECGRTFRGHITLVQHQITHCGERPCKCTECRKGFNQSSHLRNNQRKTLSGEKPYKCSECGKAFSYCLVLNQHQRIHSGEKPYEGTECGKTFIQSYIPYSASKNSHTGEKPYTCLECGRLFSQNTHLTLHQRIHTGEKPYECNECGRSFSQTAHLTQHQRMYTGEKLYECNECEKAFHDHSALIQHHIVHTAEKPYEYHDWENFQLLFRPHSTSENAHWRETIQMQ

SEQ ID NO: 201 - protein, 199 aa, Homo sapiens [sequence omitted]

SEQ ID NO: 202 - protein, 230 aa, Homo sapiens
MKLIVGIGGMTNGGKTTLTNSLLRALPNCCVIHQDDFFKPQDQIAVGEDGFKQWDVLESLDMEAMLDTVQAWLSSPQKFARAHGVSVQPEASDTHILLLEGFLLYSYKPLVDLYSRRYFLTVPYEECKWRRSTRNYTVPDPPGLFDGHVWPMYQKYRQEMEANGVEVVYLDGMKSREELFREVLEDIQNSLLNRSQESAPSPARPARTQGPGRGCGHRTARPAASQQDSM

SEQ ID NO: 203 - protein, 415 aa, Homo sapiens [sequence omitted]

SEQ ID NO: 204 - protein, 564 aa, Homo sapiens
MLANSASVRILIKGGKVVNDDCTHEADVYIENGIIQQVGRELMIPGGAKVIDATGKLVIPGGIDTSTHFHQTFMNATCVDDFYHGTKAALVGGTTMIIGHVLPDKETSLVDAYEKCRGLADPKVCCDYALHVGITWWAPKVKAEMETLVREKGVNSFQMFMTYKDLYMLRDSELYQVLHACKDIGAIARVHAENGELVAEGAKEALDLGITGPEGIEISRPEELEAEATHRVITIANRTHCPIYLVNVSSISAGDVIAAAKMQGKVVLAETTTAHATLTGLHYYHQDWSHAAAYVTVPPLRLDTNTSTYLMSLLANDTLNIVASDHRPFTTKQKAMGKEDFTKIPHGVSGVQDRMSVIWERGVVGGKMDENRFVAVTSSNAAKLLNLYPRKGRIIPGADADVVVWDPEATKTISASTQVQGGDFNLYENMRCHGVPLVTISRGRVVYENGVFMCAEGTGKFCPLRSFPDTVYKKLVQREKTLKVRGVDRTPYLGDVAVVVHPGKKEMGTPLADTPTRPVTRHGGMRDLHESSFSLSGSQIDDHVPKRASARILAPPGGRSSGIW

SEQ ID NO: 205 - protein, 388 aa, Homo sapiens
MKWLLLLGLVALSECIMYKVPLIRKKSLRRTLSERGLLKDFLKKHNLNPARKYFPQWEAPTLVDEQPLENYLDMEYFGTIGIGTPAQDFTVVFDTGSSNLWVPSVYCSSLACTNHNRFNPEDSSTYQSTSETVSITYGTGSMTGILGYDTVQVGGISDTNQIFGLSETEPGSFLYYAPFDGILGLAYPSISSSGATPVFDNIWNQGLVSQDLFSVYLSADDQSGSVVIFGGIDSSYYTGSLNWVPVTVEGYWQITVDSITMNGEAIACAEGCQAIVDTGTSLLTGPTSPIANIQSDIGASENSDGDMVVSCSAISSLPDIVFTINGVQYPVPPSAYILQSEGSCISGFQGMNLPTESGELWILGDVFIRQYFTVFDRANNQVGLAPVA

SEQ ID NO: 206 - protein, 821 aa, Homo sapiens
MGLGNASTGYGKIWLDDVSCDGDESDLWSCRNSGWGNNDCSHSEDVGVICSDASDMELRLVGGSSRCAGKVEVNVQGAVGILCANGWGMNIAEVVCRQLECGSAIRVSREPHFTERTLHILMSNSGCTGGEASLWDCIRWEWKQTACHLNMEASLICSAHRQPRLVGADMPCSGRVEVKHADTWRSVCDSDFSLHAANVLCRELNCGDAISLSVGDHFGKGNGLTWAEKFQCEGSETHLALCPIVQHPEDTCIHSREVGVVCSRYTDVRLVNGKSQCDGQVEINVLGHWGSLCDTHWDPEDARVLCRQLSCGTALSTTGGKYIGERSVRVWGHRFHCLGNESLLDNCQMTVLGAPPCIHGNTVSVICTGSLTQPLFPCLANVSDPYLSAVPEGSALICLEDKRLRLVDGDSRCAGRVEIYHDGFWGTICDDGWDLSDAHVVCQKLGCGVAFNATVSAHFGEGSGPIWLDDLNCTGMESHLWQCPSRGWGQHDCRHKEDAGVICSEFTALRLYSETETESCAGRLEVFYNGTWGSVGRRNITTAIAGIVCRQLGCGENGVVSLAPLSKTGSGFMWVDDIQCPKTHISIWQCLSAPWERRISSPAEETWITCEDRIRVRGGDTECSGRVEIWHAGSWGTVCDDSWDLAEAEVVCQQLGCGSALAALRDASFGQGTGTIWLDDMRCKGNESFLWDCHAKPWGQSDCGHKEDAGVRCSGQSLKSLNASSGHLALILSSIFGLLLLVLFILFLTWCRVQKQKHLPLRVSTRRRGSLEENLFHEMETCLKREDPHGTRTSDDTPNHGCEDASDTSLLGVLPASEATK

SEQ ID NO: 207 - protein, 173 aa, Homo sapiens
MPMKGRFPIRRTLQYLSQGNVVFKDSVKVMTVNYNTHGELGEGARKFVFFNIPQIQYKNPWVQIMMFKNMTPSPFLRFYLDSGEQVLVDVETKSNKEIMEHIRKILGKNEETLREEEEEKKQLSHPANFGPRKYCLRECICEVEGQVPCPSLVPLPKEMRGKYKAALKADAQD

SEQ ID NO: 208 - protein, 99 aa, Homo sapiens
MRLKARGGTVEDKVEIKPSRRGCWWESFFVCLFFETESYSVIQAGVQWHNLSSLQPPPPEFKLFSCLSLLSSWDFRLPPPCPANFCIFSRDRVSPCWPG

SEQ ID NO: 209 - protein, 368 aa, Homo sapiens
MAAAAEERMAEEGGGGQGDGGSSLASGSTQRQPPPPAPQHPQPGSQALPAPALAPDQLPQNNTLVALPIVAIENILSFMSYDEISQLRLVCKRMDLVCQRMLNQGFLKVERYHNLCQKQVKAQLPRRESERRNHSLARHADILAAVETRLSLLNMTFMKYVDSNLCCFIPGKVIDEIYRVLRYVNSTRAPQRAHEVLQELRDISSMAMEYFDEKIVPILKRKLPGSDVSGRLMGSPPVPGPSAALTTMQLFSKQNPSRQEVTKLQQQVKTNGAGVTVLRREISELRTKVQEQQKQLQDQDQKLLEQTQIIGEQNARLAELERKLREVMESAVGNSSGSGQNEESPRKRKKATEAIDSLRKSKRLRNRK

SEQ ID NO: 210 - protein, 134 aa, Homo sapiens
MTPNRGPLSPPNDLRPSHVISLPLHNAPHTRPTNQHTNHIPMMARCNTRKHIPRPPHTTCPKRPSIRDNPIYYLRSFFLRRIFLSLLPLQPSPYPPIRRALAPNRHHPAKSPRSPTPKHIRITRIRSINHLSSP

SEQ ID NO: 211 - protein, 83 aa, Homo sapiens
MANLLLLIVPILIAMAFLMLTERKILGYIQLRKGPNVVGPYGLLQPFADAIKLFTKEPLKAATSTITLYITAPTLALTIALLL

SEQ ID NO: 212 - protein, 415 aa, Homo sapiens
MANPSGFGLGSSNLTNAISSTVTSSQGTAPTGFVFGPSTTSVAPATTSGGFSFTGGSTAQPSGFNIGSAGNSAQPTAPATLPFTPATPAATTAGATQPAAPTPTATITSTGPSLFASIATAPTSSATTGLSLCTPVTTAGAPTAGTQGFSLKAPGAASGTSTTTSTAATATATTTTSSSTTGFALNLKPLAPAGIPSNTAAAVTAPPGPGAAAGAAASSAMTYAQLESLINKWSLELEDQERHFLQQATQVNAWDRTLIENGEKITSLHREVEKVKLDQKRLDQELDFILSQQKELEDLLSPLEELVKEQSGTIYLQHADEEREKTYKLAENIDAQLKRMAQDLKDIIEHLNTSGAPADTSDPLQQICKILNAHMDSLQWIDQNSALLQRKVEEVTKVCEGRRKEQERSFRITFD

SEQ ID NO: 213 - protein, 664 aa, Homo sapiens
MKRRNADCSKLRRPLKRNRITEGIYGSTFLYLKFLVVWALVLLADFVLEFRFEYLWPFWLFIRSVYDSFRYQGLAFSVFFVCVAFTSNIICLLFIPIQWLFFAASTYVWVQYVWHTERGVCLPTVSLWILFVYIEAAIRFKDLKNFHVDLCRPFAAHCIGYPVVTLGFGFKSYVSYKMRLRKQKEVQKENEFYMQLLQQALPPEQQMLQKQEKEAEEAAKGLPDMDSSILIHHNGGIPANKKLSTTLPEIEYREKGKEKDKDAKKHNLGINNNNILQPVDSKIQEIEYMENHINSKRLNNDLVGSTENLLKEDSCTASSKNYKNASGVVNSSPRSHSATNGSIPSSSSKNEKKQKCTSKSPSTHKDLMENCIPNNQLSKPDALVRLEQDIKKLKADLQASRQVEQELRSQISSLSSTERGIRSEMGQLRQENELLQNKLHNAVQMKQKDKQNISQLEKKLKAEQEARSFVEKQLMEEKKRKKLEEATAARAVAFAAASRGECTETLRNRIRELEAEGKKLTMDMKVKEDQIRELELKVQELRKYKENEKDTEVLMSALSAMQDKTQHLENSLSAETRIKLDLFSALGDAKRQLEIAQGQILQKDQEIKDLKQKIAEVMAVMPSITYSAATSPLSPVSPHYSSKFVETSPSGLDPNASVYQPLKK

SEQ ID NO: 214 - protein, 255 aa, Homo sapiens [sequence omitted]

SEQ ID NO: 215 - protein, 613 aa, Homo sapiens [sequence omitted]

SEQ ID NO: 216 - protein, 312 aa, Homo sapiens
MWSEGRYEYERIPRERAPPRSHPSDESGYRWTRDDHSASRQPEYRDMRDGFRRKSFYSSHYARERSPYKRDNTFFRESPVGRKDSPHSRSGSSVSSRSYSPERSKSYSFHQSQHRKSVRPGASYKRQNEGNPERDKERPVQSLKTSRDTSPSSGSAVSSSKVLDKPSRLTEKELAEAASKWAAEKLEKSDESNLPEISEYEAGSTAPLFTDQPEEPESNTTHGIELFEDSQLTTRSKAIASKTKEIEQVYRQDCETFGMVVKMLIEKDPSLEKSIQFALRQNLHEIGERCVEELKHFIAEYDTSTQDFGEPF

SEQ ID NO: 217 - protein, 578 aa, Homo sapiens
MAHSLSVGGSGYVCPLLIREVFIQVLIKLRVCFVQCFSEADRDIMTLANHWNCPVLSSDSDFCIFDLKTGFCPLNSFQWRNMNTIKGTQNYIPAKCFSLDAFCHHFSNMNKALLPLFAVLCGNDHVNLPIMETFLSKARLPLGATSSKGRRHHRILGLLNWLSHFANPTEALDNVLKYLPKKDRENVKELLCCSMEEYQQSQVKLQDFFQCGTYVCPDALNLGLPEWVLVALAKGQLSPFISDALVLRRTILPTQVENMQQPNAHRISQPIRQIIYGLLLNASPHLDKTSWNALPPQPLAFSEVERINKNIRTSIIDAVELAKDHSDLSRLTELSLRRRQMLLLETLKVKQTILEPIPTSLKLPIAVSCYWLQHTETKAKLHHLQSLLLTMLVGPLIAIINSPGKEELQEDGAKMLYAEFQRVKAQTRLGTRLDLDTAHIFCQWQSCLQMGMYLNQLLSTPLPEPDLTRLYSGSLVHGLCQQLLASTSVESLLSICPEAKQLYEYLFNATRSYAPAEIFLPKGRSNSKKKRQKKQNTSCSKNRGRTTAHTKCWYEGNNRFGLLMVENLEEHSEASNIE

SEQ ID NO: 218 - protein, 60 aa, Homo sapiens
MIGIVITVIPHINTAFLPKKKQLSTNTKKRSPSFLSLLSLCVCVCVCVCVCVCVCLFLCL

SEQ ID NO: 219 - protein, 112 aa, Homo sapiens
MFMTSKETFTHYQPQGNSDPAHTATAPGGLSAKAPAMTPLMLDTSSRKLVAWDGTTDGAAVGILAVAADQTSTTLTFYKSGTFRYEDVLWPEAASDKTKKRTAFAGTAISIV

SEQ ID NO: 220 - protein, 92 aa, Homo sapiens [sequence omitted]

SEQ ID NO: 221 - protein, 158 aa, Homo sapiens
MVEINNQRKAFLDMLAWSEGTDNGRQKTRNHGYDVIVGGELFTDYSDHPRKLVTLNPKLKSTGAGRYQLLSRWWDAYRKQLGLKDFSPKSQDAVALQQIKERGALPMIDRGDIRQAIDRCSNIWASLPGAGYGQFEHKADSLIAKFKEAGGTVREIDV

SEQ ID NO: 222 - protein, 239 aa, Homo sapiens
MAAAALRPPAQGTVTFEDVAVNFSQEEWSLLSEAQRCLYHDVMLENLTLISSLGCWYGAKDETPSKQTLSIQQESPLRTHWTGVCTKKVHLWGMCGPLLGDILHQGTQHNQKLNGFGAYEKKLDDDANHHQDQKQHIGEKSYRSNAKGTSFVKNCKFHMSHEPFIFHEVGKDFLSSLRLLQQEDIHTSGKSDFETKHGIPLQGGKTHYICGESTYRLATNTPLFLHQRLPPRGRTLCMQ

SEQ ID NO: 223 - protein, 513 aa, Homo sapiens
MAREPRKNAALDAQSAEDQTGFLTVKVEKEEAFALTAEVRAPCSPARGPERSRQRFRGFRYPEAAGPREALSRLRELCGQWLQPEMHSKEQILELLVLEQFLTILPGNLQSWVREQHPESGEEVVVLLEYLERQLDEPAPQVERTGLVSERCGLFPPEIPDRSEGHSFKVQEFFISFCTVNLLGSKGLLKMEDVALTLTPGWTQLDSSQVNLYRDEKQENHSSLVSLGGEIQTKSRDLPPVKKLPEKEHGKICHLREDIAQIPTHAEAGEQEGRLQRKQKNAIGSRRHYCHECGKSFAQSSGLTKHRRIHTGEKPYECEDCGKTFIGSSALVIHQRVHTGEKPYECEECGKVFSHSSNLIKHQRTHTGEKPYECDDCGKTFSQSCSLLEHHKIHTGEKPYQCNMCGKAFRRNSHLLRHQRIHGDKNVQNPEHGESWESQGRTESQWENTEAPVSYKCNECERSFTRNRSLIEHQKIHTGEKPYQCDTCGKGFTRTSYLVQHQRSHVGKKTLSQ

SEQ ID NO: 224 - protein, 241 aa, Homo sapiens
MLPAVGSADEEEDPAEEDCPELVPMETTQSEEEEKSGLGAKIPVTIITGYLGAGKTTLLNYILTEQHSKRVAVILNEFGEGSALEKSLAVSQGGELYEEWLELRNGCLCCSVKDNGLRAIENLMQKKGKFDYILLETTGLADPGAVASMFWVDAELGSDIYLDGIITIVDSKYGLKHLAEEKPDGLINEATRQVALADAILINKTDLVPEEDVKKLRATIRSINGLGQILETQRSRTINMQ

SEQ ID NO: 225 - protein, 761 aa, Homo sapiens
MAMQEKYPTEGISHVTSPSSDVIQKGSSLGTEWQTPVISEPFRSRFSRCSSVADSGDTAIGTSCSDIAEDFCSSSGSPPFQPIKSHVTIPTAHVMPSTLGTSPAKPNSTPVGPSSSKLPLSGLAESVGMTRNGDLGAMKHSPGLSRDLMYFSGATGENGIEQSWFPAVGHERQEEARKFDIPSMESTLNQSAMMETLYSDPHHRVRFHNPRTSTSKELYRVLPEAKKAPGSGAVFERNGPHSNSSGVLPLGLQPAPGLSKPLPSQVWQPSPDTWHPREQSCELSTCRQQLELIRLQMEQMQLQNGAICHHPAAFGPSLPILEPAQWISILNSNEHLLKEKELLIDKQRKHISQLEQKVRESELQVHSALLGRPAPFGDVCLLRLQELQRENTFLRAQFAQKTEALSREKIDLEKKLSASEVEVQLIRESLKVALQKHSEEVKKQEERVKGRDKHINNLKKKCQKESEQNREKQQRIETLERYLADLPTLEDHQKQSQQLKDSELKSTELQEKVTELESLLEETQAICREKEIQLESLRQREAEFSSAGHSLQDKQSVEETSGEGPEVEMESWQKRYDSLQKIVEKQQQKMDQLRSQVQSLEQEVAQEEGTSQALREEAQRRDSALQQLRTAVKELSVQNQDLIEKNLTLQEHLRQAQPGSPPSPDTAQLALELHQELASCLQDLQAVCSIVTQRAQGHDPNLSLLLGIHSQHPETQLDLQKPDVIKRKLEEVQQLRRDIEDLRTTMSDRYAQDMGENCVTQ

SEQ ID NO: 226 - protein, 1544 aa, Homo sapiens
MYKVYLGDIPLKTKEGAVLKPELKRDPVSTRVKLKIVPHLLRSRQAAETFPANIQVVYDGLFGTNTNSKLRTLSLQFVHHICITCPEIKIKPLGPMLLNGLTKLINEYKEDPKLLSMAYSAVGKLSSRMPHLFTKDIALVQQLFEALCKEEPETRLAIQEALSMMVGAYSTLEGAQRTLMEALVASYLIKPEVQVRQVAVKFASTVFPSDHIPSRYLLLLAAGDPREEVHGEAQRVLRCLPGRNRKESTSEQMPSFPEMVYYIQEKASHRMKTPVKYMTGTTVLPFNPAAFGEIVLYLRMCLAHSAGVVPTSQSLADMQDHAPAIGRYIRTLMSSGQMAPSSSNKSGETNPVQIYIGLLQQLLAGVGGLPVMYCLLEAVSVYPEKLATKFVDKTEWIKSLMNNSKEEMRELAALFYSVVVSTVSGNELKSMIEQLIKTTKDNHSPEIQHGSLLALGFTVGRYLAKKKMRMSEQQDLERNADTLPDQEELIQSATETIGSFLDSTSPLLAIAACTALGEIGRNGPLPIPSEGSGFTKLHLVESLLSRIPSSKETNKMKERAIQTLGYFPVGDGDFPHQKLLLQGLMDSVEAKQIELQFTIGEAITSAAIGTSSVAARDAWQMTEEEYTPPAGAKVNDVVPWVLDVILNKHIISPNPHVRQAACIWLLSLVRKLSTHKEVKSHLKEIQSAFVSVLSENDELSQDVASKGLGLVYELGNEQDQQELVSTLVETLMTGKRVKHEVSGETVVFQGGALGKTPDGQGLSTYKELCSLASDLSQPDLVYKFMNLANHHAMWNSRKGAAFGFNVIATRAGEQLAPFLPQLVPRLYRYQFDPNLGIRQAMTSIWNALVTDKSMVDKYLKEILQDLVKNLTSNMWRVRESSCLALNDLLRGRPLDDIIDKLPEIWETLFRVQDDIKESVRKAAELALKTLSKVCVKMCDPAKGAAGQRTIAALLPCLLDKGMMSTVTEVRALSINTLVKISKSAGAMLKPHAPKLIPALLESLSVLEPQVLNYLSLRATEQEKAAMDSARLSAAKSSPMMETINMCLQYLDVSVLGELVPRLCELIRSGVGLGTKGGCASVIVSLTTQCPQDLTPYSGKLMSALLSGLTDRNSVIQKSCAFAMGHLVRTSRDSSTEKLLQKLNGWYMEKEEPIYKTSCALTIHAIGRYSPDVLKNHAKEVLPLAFLGMHEIADEEKSEKEECNLWTEVWQENVPGSFGGIRLYLQELITITQKALQSQSWKMKAQGAIAMASIAKQTSSLVPPYLGMILTALLQGLAGRTWAGKEELLKAIACVVTACSAELEKSVPNQPSTNEILQAVLKECSKENVKYKIVAISCAADILKATKEDRFQEFSNIVIPLIKKNSLESSGVRTTKNEEENEKEKELQLEYLLGAFESLGKAWPRNAETQRCYRQELCKLMCERLKLSTWKVQLGVLQSMNAFFQGLMLLEEEHADPEALAEILLETCKSITYSLENKTYSSVRTEALSVIELLLKKLEESKQWECLTSECRVLLIESLATMEPDSRPELQEKAALLKKTLENLE

SEQ ID NO: 227 - protein, 513 aa, Homo sapiens
MREGACKLLAACSQREQALEATKSLLVCNSRILSYMGELQRRKEAQVLGKTSRRPSDSGPPAERSPCRGRVCISDLRIPLMWKDTEYFKNKGDLHRWAVFLLLQLGEHIQDTEMILVDRTLTDISFQSNVLFAEAGPDFELRLELYGACVEEEGALTGGPKRLATKLSSSLGRSSGRRVRASLDSAGGSGSSPILLPTPVVGGPRYHLLAHTTLTLAAVQDGFRTHDLTLASHEENPAWLPLYGSVCCRLAAQPLCMTQPTASGTLRVQQAGEMQNWAQVHGVLKGTNLFCYRQPEDADTGEEPLLTIAVNKETRVRAGELDQALGRPFTLSISNQYGDDEVTHTLQTESREALQSWMEALWQLFFDMSQWKQCCDEIMKIETPAPRKPPQALAKQGSLYHEMAIEPLDDIAAVTDILTQREGARLETPPPWLAMFTDQPALPNPCSPASVAPAPDWTHPLPWGRPRTFSLDAVPPDHSPRARSVAPLPPQRSPRTRGLCSKGQPRTWLQSPV

SEQ ID NO: 228 - protein, 364 aa, Homo sapiens
MTEKEVLESPKPSFPAETRQSGLQRLKQLLRKGSTGTKEMELPPEPQANGEAVGAGGGPIYYIYEEEEEEEEEEEEPPPEPPKLVNDKPHKFKDHFFKKPKFCDVCARMIVLNNKFGLRCKNCKTNIHEHCQSYVEMQRCFGKIPPGFHRAYSSPLYSNQQYACVKDLSAANRNDPVFETLRTGVIMANKERKKGQADKKNPVAAMMEEEPESARPEEGKPQDGNPEGDKKAEKKTPDDKHKQPGFQQSHYFVALYRFKALEKDDLDFPPGEKITVIDDSNEEWWRGKIGEKVGFFPPNFIIRVRAGERVHRVTRSFVGNREIGQITLKKDQIVVQKGDEAGGYVKVYTGRKVGLFPTDFLEEI

SEQ ID NO: 229 - protein, 145 aa, Homo sapiens
MVLSPADKTNVKAAWGKVGAHAGEYGAEALERMFLSFPTTKTYFPHFDLSHGSAQVKGHGKKVADALTNAVANVGRHAQRAVRPERPARAQASGGPGQLQAPKPLPAGDPGPPTSPPSSPPAVATFSLGTSSWFFVEHRVDCKYL

SEQ ID NO: 230 - protein, 1247 aa, Homo sapiens
MEDAGAAGPGPEPEPEPEPEPEPAPEPEPEPKPGAGTSEAFSRLWTDVMGILDGSLGNIDDLAQQYADYYNTCFSDVCERMEELRKRRVSQDLEVEKPDASPTSLQLRSQIEESLGFCSAVSTPEVERKNPLHKSNSEDSSVGKGDWKKKNKYFWQNFRKNQKGIMRQTSKGEDVGYVASEITMSDEERIQLMMMVKEKMITIEEALARLKEYEAQHRQSAALDPADWPDGSYPTFDGSSNCNSREQSDDETEESVKFKRLHKLVNSTRRVRKKLIRVEEMKKPSTEGGEEHVFENSPVLDERSALYSGVHKKPLFFDGSPEKPPEDDSDSLTTSPSSSSLDTWGAGRKLVKTFSKGESRGLIKPPKKMGTFFSYPEEEKAQKVSRSLTEGEMKKGLGSLSHGRTCSFGGFDLTNRSLHVGSNNSDPMGKEGDFVYKEVIKSPTASRISLGKKVKSVKETMRKRMSKKYSSSVSEQDSGLDGMPGSPPPSQPDPEHLDKPKLKAGGSVESLRSSLSGQSSMSGQTVSTTDSSTSNRESVKSEDGDDEEPPYRGPFCGRARVHTDFTPSPYDTDSLKLKKGDIIDIISKPPMGTWMGLLNNKVGTFKFIYVDVLSEDEEKPKRPTRRRRKGRPPQPKSVEDLLDRINLKEHMPTFLFNGYEDLDTFKLLEEEDLDELNIRDPEHRAVLLTAVELLQEYDSNSDQSGSQEKLLVDSQGLSGCSPRDSGCYESSENLENGKTRKASLLSAKSSTEPSLKSFSRNQLGNYPTLPLMKSGDALKQGQEEGRLGGGLAPDTSKSCDPPGVTGLNKNRRSLPVSICRSCETLEGPQTVDTWPRSHSLDDLQVEPGAEQDVPTEVTEPPPQIVPEVPQKTTASSTKAQPLEQDSAVDNALLLTQSKRFSEPQKLTTKKLEGSIAASGRGLSPPQCLPRNYDAQPPGAKHGLARTPLEGHRKGHEFEGTHHPLGTKEGVDAEQRMQPKIPSQPPPVPAKKSRERLANGLHPVPMGPSGALPSPDAPCLPVKRGSPASPTSPSDCPPALAPRPLSGQAPGSPPSTRPPPWLSELPENTSLQEHGVKLGPALTRKVSCARGVDLETLTENKLHAEGIDLTEEPYSDKHGRCGIPEALVQRYAEDLDQPERDVAANMDQIRVKQLRKQHRMAIPSGGLTEICRKPVSPGCISSVSDWLISIGLPMYAGTLSTAGFSTLSQVPSLSHTCLQEAGITEERHIRKLLSAARLFKLPPGPEAM

SEQ ID NO: 231 - protein, 855 aa, Homo sapiens
MVVMARLSRPERPDLVFEEEDLPYEEEIMRNQFSVKCWLRYIEFKQGAPKPRLNQLYERALKLLPCSYKLWYRYLKARRAQVKHRCVTDPAYEDVNNCHERAFVFMHKMPRLWLDYCQFLMDQGRVTHTRRTFDRALRALPITQHSRIWPLYLRFLRSHPLPETAVRGYRRFLKLSPESAEEYIEYLKSSDRLDEAAQRLATVVNDERFVSKAGKSNYQLWHELCDLISQNPDKVQSLNVDAIIRGGLTRFTDQLGKLWCSLADYYIRSGHFEKARDVYEEAIRTVMTVRDFTQVFDSYAQFEESMIAAKMETASELGREEEDDVDLELRLARFEQLISRRPLLLNSVLLRQNPHHVHEWHKRVALHQGRPREIINTYTEAVQTVDPFKATGKPHTLWVAFAKFYEDNGQLDDARVILEKATKVNFKQVDDLASVWCQCGELELRHENYDEALRLLRKATALPARRAEYFDGSEPVQNRVYKSLKVWSMLADLEESLGTFQSTKAVYDRILDLRIATPQIVINYAMFLEEHKYFEESFKAYERGISLFKWPNVSDIWSTYLTKFIARYGGRKLERARDLFEQALDGCPPKYAKTLYLLYAQLEEEWGLARHAMAVYERATRAVEPAQQYDMFNIYIKRAAEIYGVTHTRGIYQKAIEVLSDEHAREMCLRFADMECKLGEIDRARAIYSFCSQICDPRTTGAFWQTWKDFEVRHGNEDTIKEMLRIRRSVQATYNTQVNFMASQMLKVSGSATGTVSDLAPGQSGMDDMKLLEQRAEQLAAEAERDQPLRAQSKILFVRSDASREELAELAQQVNPEEIQLGEDEDEDEMDLEPNEVRLEQQSVPAAVFGSLKED

SEQ ID NO: 232 - protein, 771 aa, Homo sapiens
MHRSGRYGTQQQRAGSKTAGPPCQWSRMASEGTNIPSPVVRQIDKQFLICSICLERYKNPKVLPCLHTFCERCLQNYIPAHSLTLSCPVCRQTSILPEKGVAALQNNFFITNLMDVLQRTPGSNAEESSILETVTAVAAGKPLSCPNHDGNVMEFYCQSCETAMCRECTEGEHAEHPTVPLKDVVEQHKASLQVQLDAVNKRLPEIDSALQFISEIIHQLTNQKASIVDDIHSTFDELQKTLNVRKSVLLMELEVNYGLKHKVLQSQLDTLLQGQESIKSCSNFTAQALNHGTETEVLLVKKQMSEKLNELADQDFPLHPRENDQLDFIVETEGLKKSIHNLGTILTTNAVASETVATGEGLRQTIIGQPMSVTITTKDKDGELCKTGNAYLTAELSTPDGSVADGEILDNKNGTYEFLYTVQKEGDFTLSLRLYDQHIRGSPFKLKVIRSADVSPTTEGVKRRVKSPGSGHVKQKAVKRPASMYSTGKRKENPIEDDLIFRVGTKGRNKGEFTNLQGVAASTNGKILIADSNNQCVQIFSNDGQFKSRFGIRGRSPGQLQRPTGVAVHPSGDIIIADYDNKWVSIFSSDGKFKTKIGSGKLMGPKGVSVDRNGHIIVVDNKACCVFIFQPNGKIVTRFGSRGNGDRQFAGPHFAAVNSNNEIIITDFHNHSVKVFNQEGEFMLKFGSNGEGNGQFNAPTGVAVDSNGNIIVADWGNSRIQVFDGSGSFLSYINTSADPLYGPQGLALTSDGHVVVADSGNHCFKVYRYLQ

SEQ ID NO: 233 - protein, 56 aa, Homo sapiens [sequence omitted]

SEQ ID NO: 234 - protein, 803 aa, Homo sapiens
MRALWVLGLCCVLLTFGSVRADDEVDVDGTVEEDLGKSREGSRTDDEVVQREEEAIQLDGLNASQIRELREKSEKFAFQAEVNRMMKLIINSLYKNKEIFLRELISNASDALDKIRLISLTDENALSGNEELTVKIKCDKEKNLLHVTDTGVGMTREELVKNLGTIAKSGTSEFLNKMTEAQEDGQSTSELIGQFGVGFYSAFLVADKVIVTSKHNNDTQHIWESDSNEFSVIADPRGNTLGRGTTITLVLKEEASDYLELDTIKNLVKKYSQFINFPIYVWSSKTETVEEPMEEEEAAKEEKEESDDEAAVEEEEEEKKPKTKKVEKTVWDWELMNDIKPIWQRPSKEVEEDEYKAFYKSFSKESDDPMAYIHFTAEGEVTFKSILFVPTSAPRGLFDEYGSKKSDYIKLYVRRVFITDDFHDMMPKYLNFVKGVVDSDDLPLNVSRETLQQHKLLKVIRKKLVRKTLDMIKKIADDKYNDTFWKEFGTNIKLGVIEDHSNRTRLAKLLRFQSSHHPTDITSLDQYVERMKEKQDKIYFMAGSSRKEAESSPFVERLLKKGYEVIYLTEPVDEYCIQALPEFDGKRFQNVAKEGVKFDESEKTKESREAVEKEFEPLLNWMKDKALKDKIEKAVVSQRLTESPCALVASQYGWSGNMERIMKAQAYQTGKDISTNYYASQKKTFEINPRHPLIRDMLRRIKEDEDDKTVLDLAVVLFETATLRSGYLLPDTKAYGDRIERMLRLSLNIDPDAKVEEEPEEEPEETAEDTTEDTEQDEDEEMDVGTDEEEETAKESTAEKDEL

SEQ ID NO: 235 - protein, 82 aa, Homo sapiens
MGREFGNLTRMRHVISYSLSPFEQRAYPHVFTKGIPNVLRRIRESFFRVVPQFVVFYLIYTWGTEEFERSKRKNPAAYENDK

SEQ ID NO: 236 - protein, 90 aa, Homo sapiens [sequence omitted]

SEQ ID NO: 237 - protein, 287 aa, Homo sapiens
MGTNEAAIIEILSGRTSDERQQIKQKYKATYGKELEEVLKSELSGNFEKTALALLDHPSEYAARQLQKAMKGLGTDESVLIEFLCTRTNKEIIAIKEAYQRLFDRSLESDVKGDTSGNLKKILVSLLQANRNEGDDVDKDLAGQDAKDLYDAGEGRWGTDELAFNEVLAKRSYKQLRATFQAYQILIGKDIEEAIEEETSGDLQKAYLTLVRCAQDCEDYFAERLYKSMKGAGTDEETLIRIIVTRAEVDLQGIKAKFQEKYQKSLSDMVRSDTSGDFRKLLVALLH

SEQ ID NO: 238 - protein, 182 aa, Homo sapiens
MTTASPSQVRQNYHQDAEAAINRQINLELYASYVYLSMSCYFDRDDVALKNFAKYFLHQSHEEREHAEKLMKLQNQRGGRIFLQDIKKPDRDDWESGLNAMECALHLEKSVNQSLLELHKLATDKNDPHLCDFIETYYLSEQVKSIKELGDHVTNLRKMGAPEAGMAEYLFDKHTLGHGDES

SEQ ID NO: 239 - protein, 181 aa, Homo sapiens
MFKKFDEKENVSNCIQLKTSVIKGIKNQLIEQFPGIEPWLNQIMPKKDPVKIVRCHEHIEILTVNGELLFFRQREGPFYPTLRLLHKYPFILPHQQVDKGAIKFVLSGANIMCPGLTSPGAKLYPAAVDTIVAIMAEGKQHALCVGVMKMSAEDIEKVNKGIGIENIHYLNDGLWHMKTYK

SEQ ID NO: 240 - protein, 30 aa, Homo sapiens
MPGKFFVFCIFCRNRISPCWPGWSRTPGLN

SEQ ID NO: 241 - protein, 377 aa, Homo sapiens [sequence omitted]

SEQ ID NO: 242 - protein, 106 aa, Homo sapiens
MHSRPWAWGASEMCFCFFEMGSFCCPSRSTVARSQLTAASTSWAQVILPPQPPECLLLVFMMTWGPGILHLCCSGASPAPGAHQPQLRREALICRAKQLCFHVDPA

SEQ ID NO: 243 - protein, 128 aa, Homo sapiens [sequence omitted]

SEQ ID NO: 244 - protein, 158 aa, Homo sapiens
MALWRAYQRALAAHPWKVQVLTAGSLMGLGDIISQQLVERRGLQEHQRGRTLTMVSLGCGFVGPVVGGWYKVLDRFIPGTTKVDALKKMLLDQGGFAPCFLGCFLPLDYPDALITNYYLWPAVQLANFYLVPLHYRLAVVQCVAVIWNSYLSWKAHRL

SEQ ID NO: 245 - protein, 234 aa, Homo sapiens
MGPPSACPHRECIPWQGLLLTASLLTFWNAPTTAWLFIASAPFEVAEGENVHLSVVYLPENLYSYGWYKGKTVEPNQLIAAYVIDDTHVRTPGPAYSGRETISPSGDLHFQKVTLEDTGYYTLQVTYRNSQIEQASHHLRVYESVAQPSIQASSTTVTEKGSVVLTCHTNNTGTSFQWIFNTQRLQVTKRMKLSWFNHMLTIDPIRQEDAGENQWEVSNPISSNRSDPLKLTGK

SEQ ID NO: 246 - protein, 518 aa, Homo sapiens
MECDLMETDILESLEDLGYKGPLLEDGALSQAVSAGASSPEFTKLCAWLVSELRVLCKLEENVQATNSPSEAEEFQLEVSGLLGEMNCPYLSLTSGDVTKRLLIQKNCLLLLTYLISELEAARMLCVNAPPKKAQEGGGSEVFQELKGICIALGMSKPPANITMFQFFSGIEKKLKETLAKVPPNHVGKPLLKKPMGPAHWEKIEAINQAIANEYEVRRKLLIKRLDVTVQSFGWSDRAKSQTEKLAKVYQPKRSVLSPKTTISVAHLLAARQDLSKILRTSSGSIREKTACAINKVLMGRVPDRGGRPNEIEPPPPEMPPWQKRQDGPQQQTGGRGGGRGGYEHSSYGGRGGHEQGGGRGGRGGYDHGGRGGGRGNKHQGGWTDGGSGGGGGYQDGGYRDSGFQPGGYHGGHSSGGYQGGGYGGFQTSSSYTGSGYQGGGYQQDNRYQDGGHHGDRGGGRGGRGGRGGRGGRAGQGGGWGGRGSQNYHQGGQFEQHFQHGGYQYNHSGFGQGRHYTS

SEQ ID NO: 247 - protein, 234 aa, Homo sapiens
MLKESNFADSYYDYICIIDFEATCEEGNPPEFVHEIIEFPVVLLNTHTLEIEDTFQQYVRPEINTQLSDFCISLTGITQDQVDRADTFPQVLKKVIDWMKLKELGTKYKYSLLTDGSWDMSKFLNIQCQLSRLKYPPFAKKWINIRKSYGNFYKVPRSQTKLTIMLEKLGMDYDGRPHCGLDDSKNIARIAVRMLQDGCELRINEKMHAGQLMSVSSSLPIEGTPPPQMPHFRK

SEQ ID NO: 248 - protein, 175 aa, Homo sapiens [sequence omitted]

SEQ ID NO: 249 - protein, 27 aa, Homo sapiens
MEPGQHGKTPPPLKIQRLAGHSRCLGG

SEQ ID NO: 250 - protein, 399 aa, Homo sapiens
MFCQGLTEVSGLWIQLVDITGDLRQQLLLLGLCDPPKPDGIMRHPHCKAFLKPTVLTFISTFFVDPTVKITSVIDKLQSDCSPEETLASFTSMNSIVKSRSFISTDTTFNCHEGVGRLFMRLIVELSLLRIIRWRCRLHFDCTLVLLKFQVILVICNHWICSCEWNVFVMWSRNAGEVNSSEGLDIKGVGVVFHYGEIHGADPKVGGPECDLCVNHGHFCGHGGVAPLSGVLEADPSPPGGGCGSGSGIPQTQREPTMVLSPADKTNVKAAWGKVGAHAGEYGAEALERMFLSFPTTKTYFPHFDLSHGSAQVKGHGKKVADALTNAVAHVDDMPNALSALSDLHAHKLRVDPVNFKLLSHCLLVTLAAHLPAEFTPAVHASLDKFLASVSTVLTSKYR

SEQ ID NO: 251 - protein, 237 aa, Homo sapiens
MDNGDWGYMMTDPVTLNVGGHLYTTSLTTLTRYPDSMLGAMFGGDFPTARDPQGNYFIDRDGPLFRYVLNFLRTSELTLPLDFKEFDLLRKEADFYQIEPLIQCLNDPKPLYPMDTFEEVVELSSTRKLSKYSNPVAVIITQLTITTKVHSLLEGISNYFTKWNKHMMDTRDCQVSFTFGPCDYHQEVSLRVHLMEYITKQGFTIRNTRVHHMSERANENTVEHNWTFCRLARKTDD

SEQ ID NO: 252 - protein, 126 aa, Homo sapiens
MASASTQPAALSAEQAKVVLAEVIQAFSAPENAVRMDEARDNACNDMGKMLQFVLPVATQIQQEVIKAYGFSCDGEGVLKFARLVKSYEAQDPEIASLSGKLKALFLPPMTLPPHGPAAGGSVAAS

SEQ ID NO: 253 - protein, 585 aa, Homo sapiens
MGSLKEELLKAIWHAFTALDQDHSGKVSKSQLKVLSHNLCTVLKVPHDPVALEEHFRDDDEGPVSNQGYMPYLNRFILEKVQDNFDKIEFNRMCWTLCVKKNLTKNPLLITEEDAFKIWVIFNFLSEDKYPLIIVSEEIEYLLKKLTEAMGGGWQQEQFEHYKINFDDSKNGLSAWELIELIGNGQFSKGMDRQTVSMAINEVFNELILDVLKQGYMMKKGHRRKNWTERWFVLKPNIISYYVSEDLKDKKGDILLDENCCVESLPDKDGKKCLFLVKCFDKTFEISASDKKKKQEWIQAIHSTIHLLKLGSPPPHKEARQRRKELRKKQLAEQEELERQMKELQAANESKQQELEAVRKKLEEAASRAAEEEKKRLQTQVELQARFSTELEREKLIRQQMEEQVAQKSSELEQYLQRVRELEDMYLKLQEALEDERQARQDEETVRKLQARLLEEESSKRAELEKWHLEQQQAIQTTEAEKQELENQRVLKEQALQEAMEQLEELELERKQALEQYEEVKKKLEMATNKTKSWKDKVAHHEGLIRLIEPGSKNPHLITNWGPAAFTEAELEEREKNWKEKKTTE

SEQ ID NO: 254 - protein, 1034 aa, Homo sapiens [sequence omitted]

SEQ ID NO: 255 - protein, 86 aa, Homo sapiens
MLNLVDKSPIYLILSYLSIYLSIYLSIYLSNLSIYLVLKASRSVAQAGVQWLDPGSLQPPPPGFKQFSCLCLPSSWDYRCTPPRPA

SEQ ID NO: 256 - protein, 140 aa, Homo sapiens
MDRSNPVKPALDYFSNRLVNYHISVKCSNQFKLEVCLLKSENKVVDNQAGTQGQLKVLGANLWWPYLMHEHPAYLYSWEDGDCSHQSLGPLPACDLWDQLHLRSRQGGSVCGCDPCEQLLLLVSQLRAPGVDSAAAGRPV

SEQ ID NO: 257 - protein, 47 aa, Homo sapiens
MLAFIPVLTKKINPRSTEAAIKYFLTQATASIILLIAILFNNILSGQ

SEQ ID NO: 258 - protein, 65 aa, Homo sapiens
MCILFCFALLCFETESRSVIQAGVQWHDLGSLQPPSPRFKRFSCLLLSSWDYRCSPPHPANFLYF

SEQ ID NO: 259 - protein, 292 aa, Homo sapiens
MLRVLCLLRPWRPLRARGCASDGAAGGSEIQVRALAGPDQGITEILMNRPSARNALGNVFVSELLETLAQLREDRQVRVLLFRSGVKGVFCAGADLKEREQMSEAEVGVFVQRLRGLMNDIAAFPAPTIAAMDGFALGGGLELALACDLRVAASSAVMGLIETTRGLLPGAGGTQRLPRCLGVALAKELIFTGRRLSGTEAHVLGLVNHAVAQNEEGDAAYQRARALAQEILPQAPIAVRLGKVAIDRGTEVDIASGMAIEGMCYAQNIPTRDRLEGMAAFREKRTPKFVGK

SEQ ID NO: 260 - protein, 276 aa, Homo sapiens
MLRVLCLLRPWRPLRARGCASDGAAGGSEIQVRALAGPDQGITEILMNRPSARNALGNVFVSELLETLAQLREDRQVRVLLFRSGVKGVFCAGADLKEREQMSEAEVGVFVQRLRGLMNDIAAFPAPTIAAMDGFALGGGLELALACDLRVAASSAVMGLIETTRGLLPGAGGTQRLPRCLGVALAKELIFTGRRLSGTEAHVLGLVNHAVAQNEEGDAAYQRARALAQEILPQAPIAVRLGKVAIDRGTENIPTRDRLEGMAAFREKRTPKFVGK

SEQ ID NO: 261 - protein, 261 aa, Homo sapiens
MLRVLCLLRPWRPLRARGCASDGAAGGSEIQVRALAGPDQGITEILMNRPSARNALGNVFVSELLETLAQLREDRQVRVLLFRSGVKGVFCAGADLKEREQMSEAEVGVFVQRLRGLMNDIASSAVMGLIETTRGLLPGAGGTQRLPRCLGVALAKELIFTGRRLSGTEAHVLGLVNHAVAQNEEGDAAYQRARALAQEILPQAPIAVRLGKVAIDRGTEVDIASGMAIEGMCYAQNIPTRDRLEGMAAFREKRTPKFVGK

SEQ ID NO: 262 - protein, 184 aa, Homo sapiens
MRTSMSEAATRWSCQGSCQKTCFSRVRPWRKRCNCGDSSSRRRRSCCTGSLGPMPRLPSLWPLSLPLRSLSSPHRVQGLGPPRRLKSQLLPRFFWRRQQEPLSSFPGRNEGGSEMEILGVCPVSPGALSYMESPTGFWRPREASSLELAKGISKRRHFLPAPALCPNPRSSEAFPGAVCVTLAI

SEQ ID NO: 263 - protein, 292 aa, Homo sapiens
MRILLWAFWPIPSVLPGWHRPHRTSRVGLSGSSTAGPRNSRFGAAPSRLGHTGARCRSPVLRHLVWNFRLAVSSRSGALCGVFGGKRALRRLTPSWLCFRMKTILSNQTVDIPENVDITLKGRTVIVKGPRGTLRRDFNHINVELSLLGKKKKRLRVDKWWGNRKELATVRTICSHVQNMIKGVTLGFRYKMRSVYAHFPINVVIQENGSLVEIRNFLGEKYIRRVRMRPGVACSVSQAQKDELILEGNDIELVSNSAALIQQATTVKNKDIRKFLDGIYVSEKGTVQQADE

SEQ ID NO: 264 - protein, 28 aa, Homo sapiens
MAAIPALWEAKVGRSLEMKSLRPPWTKW

SEQ ID NO: 265 - protein, 102 aa, Homo sapiens
MTARGKTSDIEANQPLETNKENSSSVTVSDPEMENKAGQTLENSSLMAELLSDVPFTLAPHVLAVQGTITDLPDHLLSYDGSENLSRFWYDFTLENSVLCDS

SEQ ID NO: 266 - protein, 990 aa, Homo sapiens
MVVSAGPLSGEKAAINILEINEKLRPQLAEKKQQFRNLKERCFLTQLAGFLANQQNKYKYEECKDLIKFMLRNERQFKEEKLAEQLKQAEELRQYKVLVHAQERELTQLREKLREGRDASRSLNEHLQALLTPDEPDKSQGQDLQEQLAEGCRLAQHLVQKLSPENDNDDDEDVQVEVAEKVQKSSAPREMQKAEEKEVPEDSLEECAITCSNSHGPYDSNQPHKKTKITFEEDKVDSTLIGSSSHVEWEDAVHIIPENESDDEEEEEKGPVSPRNLQESEEEEVPQESWDEGYSTLSIPPEMLASYQSYSSTFHSLEEQQVCMAVDIGRHRWDQVKKEDHEATGPRLSRELLDEKGPEVLQDSLDRCYSTPSGCLELTDSCQPYRSAFYVLEQQRVGLAVNMDEIEKYQEVEEDQDPSCPRLSRELLDEKEPEVLQDSLGRCYSTPSGYLELPDLGQPYSSAVYSLEEQYLGLALDVDRIKKDQEEEEDQGPPCPRLSRELLEVVEPEVLQDSLDRCYSTPSSCLEQPDSCQPYGSSFYALEEKHVGFSLDVGEIEKKGKGKKRRGRRSKKERRRGRKEGEEDQNPPCPRLSRELLDEKGPEVLQDSLDRCYSTPSGCLELTDSCQPYRSAFYILEQQRVGLAVDMDEIEKYQEVEEDQDPSCPRLSGELLDEKEPEVLQESLDRCYSTPSGCLELTDSCQPYRSAFYILEQQRVGLAVDMDEIEKYQEVEEDQDPSCPRLSRELLAEKEPEVLQDSLDRCYSTPSGYLELPDLGQPYSSAVYSLEEQYLGLALDVDRIKKDQEEEEDQGPPCPRLSRELLEVVEPEVLQDSLDRCYSTPSSCLEQPDSCQPYGSSFYALEEKHVGFSLDVGEIEKKGKGKKRRGRRSKKERRRGRKEGEEDQNPPCPRLNSMLMEVEEPEVLQDSLDICYSTPSMYFELPDSFQHYRSVFYSFEEEHISFALYVDNRFFTLTVTSLHLVFQMGVIFPQ

SEQ ID NO: 267 - protein, 138 aa, Homo sapiens
MKLNISFPATGCQKLIEVDDERKLRTFYEKRMATEVAADALGEEWKGYVVRISGGNDKQGFPMKQGVLTHGRVRLLLSKGHSCYRPRRTGERKRKSVRGCIVDANLSVLNLVIVKKGEKDIPGLTDTTVPRRLGPQKS

SEQ ID NO: 268 - protein, 198 aa, Homo sapiens
MSFIFEWIYNGFSSVLQFLGLYKKSGKLVFLGLDNAGKTTLLHMLKDDRLGQHVPTLHPTSEELTIAGMTFTTFDLGGHEQARRVWKNYLPAINGIVFLVDCADHSRLVESKVELNALMTDETISNVPILILGNKIDRTDAISEEKLREIFGLYGQTTGKGNVTLKELNARPMEVFMCSVLKRQGYGEGFRWLSQYID

SEQ ID NO: 269 - protein, 1049 aa, Homo sapiens
MGSRTPESPLHAVQLRWGPRRRPPLVPLLLLLVPPPPRVGGFNLDAEAPAVLSGPPGSFFGFSVEFYRPGTDGVSVLVGAPKANTSQPGVLQGGAVYLCPWGASPTQCTPIEFDSKGSRLLESSLSSSEGEEPVEYKSLQWFGATVRAHGSSILACAPLYSWRTEKEPLSDPVGTCYLSTDNFTRILEYAPCRSDFSWAAGQGYCQGGFSAEFTKTGRVVLGGPGSYFWQGQILSATQEQIAESYYPEYLINLVQGQLQTRQASSIYDDSYLGYSVAVGEFSGDDTEDFVAGVPKGNLTYGYVTILNGSDIRSLYNFSGEQMASYFGYAVAATDVNGDGLDDLLVGAPLLMDRTPDGRPQEVGRVYVYLQHPAGIEPTPTLTLTGHDEFGRFGSSLTPLGDLDQDGYNDVAIGAPFGGETQQGVVFVFPGGPGGLGSKPSQVLQPLWAASHTPDFFGSALRGGRDLDGNGYPDLIVGSFGVDKAVVYRGRPIVSASASLTIFPAMFNPEERSCSLEGNPVACINLSFCLNASGKHVADSIGFTVELQLDWQKQKGGVRRALFLASRQATLTQTLLIQNGAREDCREMKIYLRNESEFRDKLSPIHIALNFSLDPQAPVDSHGLRPALHYQSKSRIEDKAQILLDCGEDNICVPDLQLEVFGEQNHVYLGDKNALNLTFHAQNVGEGGAYEAELRVTAPPEAEYSGLVRHPGNFSSLSCDYFAVNQSRLLVCDLGNPMKAGASLWGGLRFTVPHLRDTKKTIQFDFQILSKNLNNSQSDVVSFRLSVEAQAQVTLNGVSKPEAVLFPVSDWHPRDQPQKEEDLGPAVHHVYELINQGPSSISQGVLELSCPQALEGQQLLYVTRVTGLNCTTNHPINPKGLELDPEGSLHHQQKREAPSRSSASSGPQILKCPEAECFRLRCELGPLHQQESQSLQLHFRVWAKTFLQREHQPFSLQCEAVYKALKMPYRILPRQLPQKERQVATAVQWTKAEGSYGVPLWIIILAILFGLLLLGLLIYILYKLGFFKRSLPYGTAMEKAQLKPPATSDA

SEQ ID NO: 270 - protein, 233 aa, Homo sapiens
MGRRLKGARRLKLSPLRSLRKGPGLLSPPSASPVPTPAVSRTLLGNFEESLLRGRFAPSGHIEGFTAEIGASGSYCPQHVTLPVTVTFFDVSEQNAPAPFLGIVDLNPLGRKGYSVPKVGTVQVTLFNPNQTVVKMFLVTFDFSDMPAAHMTFLRHRLFLVPVGEEGNANPTHRLLCYLLHLRFRSSRSGRLSLHGDIRLLFSRRSLELDTGLPYELQAVTEAPHNPRYSPLP

SEQ ID NO: 271 - protein, 393 aa, Homo sapiens
MEQCACVERELDKVLQKFLTYGQHCERSLEELLHYVGQLRAELASAALQGTPLSATLSLVMSQCCRKIKDTVQKLASDHKDIHSSVSRVGKAIDRNFDSEICGVVSDAVWDAREQQQQILQMAIVEHLYQQGMLSVAEELCQESTLNVDLDFKQPFLELNRILEALHEQDLGPALEWAVSHRQRLLELNSSLEFKLHRLHFIRLLAGGPAKQLEALSYARHFQPFARLHQREIQVMMGSLVYLRLGLEKSPYCHLLDSSHWAEICETFTRDACSLLGLSVESPLSVSFASGCVALPVLMNIKAVIEQRQCTGVWNHKDELPIEIELGMKCWYHSVFACPILRQQTSDSNPPIKLICGHVISRDALNKLINGGKLKCPYCPMEQNPADGKRIIF

SEQ ID NO: 272 - protein, 453 aa, Homo sapiens
MSIVTVQLGQCGNQIGFEVFDALLSDSHSSQGLCSMRENEAYQASCKERFFSEEENGVPIARAVLVDMEPKVINQTLSKAAQSGQWKYGQHACFCQKQGSGNNWAYGYSVHGPRHEESIMNIIRKEVEKCDSFSGFFIIMSMAGGTGSGLGAFVTQNLEDQYSNSLKMNQIIWPYGTGEVIVQNYNSILTLSHLYRSSDALLLHENDAIHKICAKLMNIKQISFSDINQVLAHQLGSVFQPTYSAESSFHYRRNPLGDLMEHLVPHPEFKMLSVRNIPHMSENSLAYTTFTWAGLLKHLRQMLISNAKMEEGIDRHVWPPLSGLPPLSKMSLNKDLHFNTSIANLVILRGKDVQSADVEGFKDPALYTSWLKPVNAFNVWKTQRAFSKYEKSAVLVSNSQFLVKPLDMIVGKAWNMFASKAYIHQYTKFGIEEEDFLDSFTSLEQVVASYCNL

SEQ ID NO: 273 - protein, 351 aa, Homo sapiens [sequence omitted]

SEQ ID NO: 274 - protein, 328 aa, Homo sapiens
MEIVWEVLFLLQANFIVCISAQQNSPKIHEGWWAYKEVVQGSFVPVPSFWGLVNSAWNLCSVGKRQSPVNIETSHMIFDPFLTPLRINTGGRKVSGTMYNTGRHVSLRLDKEHLVNISGGPMTYSHRLEEIRLHFGSEDSQGSEHLLNGQAFSGEVQLIHYNHELYTNVTEAAKSPNGLVVVSIFIKVSDSSNPFLNRMLNRDTITRITYKNDAYLLQGLNIEELYPETSSFITYDGSMTIPPCYETASWIIMNKPVYITRMQMHSLRLLSQNQPSQIFLSMSDNFRPVQPLNNRCIRTNINFSLQGKDCPNNRAQKLQYRVNEWLLK

SEQ ID NO: 275 - protein, 89 aa, Homo sapiens
MWGGMCVYIYIHFQWMEICIYTFSVYYIYMHTLCMYVDVYLHTLKDIYLHTIQCMYDTFGYYILLKFPVATYDLISLTSYSSFKHPSYM

SEQ ID NO: 276 - protein, 217 aa, Homo sapiens
MAAQCVRLARRSLPALALSLRPSPRLLCTATKQKNSGQNLEEDMGQSEQKADPPATEKTLLEEKVKLEEQLKETVEKYKRALADTENLRQRSQKLVEEAKLYGIQAFCKDLLEVADVLEKATQCVPKEEIKDDNPHLKNLYEGLVMTEVQIQKVFTKHGLLKLNPVGAKFDPYEHEALFHTPVEGKEPGTVALVSKVGYKLHGRTLRPALVGVVKEA

SEQ ID NO: 277 - protein, 60 aa, Homo sapiens [sequence omitted]

SEQ ID NO: 278 - protein, 517 aa, Homo sapiens
MFLLFLLTCELAAEVAAEVEKSSDGPGAAQEPTWLTDVPAAMEFIAATEVAVIGFFQDLEIPAVPILHSMVQKFPGVSFGISTDSEVLTHYNITGNTICLFRLVDNEQLNLEDEDIESIDATKLSRFIEINSLHMVTEYNPVGGKEGSTQLHENEMTVIGLFNSVIQIHLLLIMNKASPEYEENMHRYQKAAKLFQGKILFILVDSGMKENGKVISFFKLKESQLPALAIYQTLDDEWDTLPTAEVSVEHVQNFCDGFLSGKLLKPYMARPRELEKEKVKHEHLLSVELLEKSPWNPGLQHAMIAPDLCTTPDHFLKYLKPRIQEVLKASLALGMIAETLRELSELVTSTFLDALETEMLLSAHKNGQPRASLPTAATQDPETDLQDETMKSLILLAILAALAVVTLCYGEWQKEENFGFDIVSVLSLNWHRAQESHESMESYELNPFINRRNANTFISPQQRWRAKVQERIRERSKPVHELNREACDDYRLCERYAMVYGYNAAYNRYFRKRRGTK

SEQ ID NO: 279 - protein, 64 aa, Homo sapiens
MCGFFFVFFFWRRSLALSPRLECSGAISAHCNLCLLGSNDSPASASQVAGIIGAHHHAWLIFYF

SEQ ID NO: 280 - protein, 599 aa, Homo sapiens
MAPPGSSTVFLLALTIIASTWALTPTHYLTKHDVERLKASLDRPFTNLESAFYSIVGLSSLGAQVPDAKKACTYIRSNLDPSNVDSLFYAAQASQALSGCEISISNETKDLLLAAVSEDSSVTQIYHAVAALSGFGLPLASQEALSALTARLSKEETVLATVQALQTASHLSQQADLRSIVEEIEDLVARLDELGGVYLQFEEGLETTALFVAATYKLMDHVGTEPSIKEDQVIQLMNAIFSKKNFESLSEAFSVASAAAVLSHNRYHVPVVVVPEGSASDTHEQAILRLQVTNVLSQPLTQATVKLEHAKSVASRATVLQKTSFTPVGDVFELNFMNVKFSSGYYDFLVEVEGDNRYIANTVELRVKISTEVGITNVDLSTVDKDQSIAPKTTRVTYPAKAKGTFIADSHQNFALFFQLVDVNTGAELTPHQTFVRLHNQKTGQEVVFVAEPDNKNVYKFELDTSERKIEFDSASGTYTLYLIIGDATLKNPILWNVADVVIKFPEEEAPSTVLSQNLFTPKQEIQWIRIGANVSNFTFAPSTIIFHLGHAAMLGLMYVYWTQLNMFQTLKYLAILGSVTFLAGNRMLAQQAVKRTAH

SEQ ID NO: 281 - protein, 140 aa, Homo sapiens
MQGSKVFIKKCSTFHLPEKCKSAPKGVTAAPSSEPQKLERWIAPVSKVTVGGRFAYTASNNAKLMEPTWKMAWHQLLEKKTHSPLTCQSHIRAWIWPSCVPGSMARNLYSQILTIAPNWNQPTYPSGREWMLKNARIAIG

SEQ ID NO: 282 - protein, 322 aa, Homo sapiens
MPVTVTRTTITTTTTSSSGLGSPMIVGSPRALTQPLGLLRLLQLVSTCVAFSLVASVGAWTGSMGNWSMFTWCFCFSVTLIILIVELCGLQARFPLSWRNFPITFACYAALFCLSASIIYPTTYVQFLSHGRSRDHAIAATFFSCIACVAYATEVAWTRARPGEITGYMATVPGLLKVLETFVACIIFAFISDPNLYQHQPALEWCVAVYAICFILAAIAILLNLGECTNVLPIPFPSFLSGLALLSVLLYATALVLWPLYQFDEKYGGQPRRSRDVSCSRSHAYYVCAWDRRLAVAILTAINLLAYVADLVHSAHLVFVKV

SEQ ID NO: 283 - protein, 680 aa, Homo sapiens [sequence omitted]

SEQ ID NO: 284 - protein, 589 aa, Homo sapiens
MSRRLLPRAEKRRRRLEQRQQPDEQRRRSGAMVKMAAAGGGGGGGRYYGGGSEGGRAPKRLKTDNAGDQHGGGGGGGGGAGAAGGGGGGENYDDPHKTPASPVVHIRGLIDGVVEADLVEALQEFGPISYVVVMPKKRQALVEFEDVLGACNAVNYAADNQIYIAGHPAFVNYSTSQKISRPGDSDDSRSVNSVLLFTILNPIYSITTDVLYTICNPCGPVQRIVIFRKNGVQAMVEFDSVQSAQRAKASLNGADIYSGCCTLKIEYAKPTRLNVFKNDQDTWDYTNPNLSGQGDPGSNPNKRQRQPPLLGDHPAEYGGPHGGYHSHYHDEGYGPPPPHYEGRRMGPPVGGHRRGPSRYGPQYGHPPPPPPPPEYGPHADSPVLMVYGLDQSKMNCDRVFNVFCLYGNVEKVKFMKSKPGAAMVEMADGYAVDRAITHLNNNFMFGQKLNVCVSKQPAIMPGQSYGLEDGSCSYKDFSESRNNRFSTPEQAAKNRIQHPSNVLHFFNAPLEVTEENFFEICDELGVKRPSSVKVFSGKSERSSSGLLEWESKSDALETLGFLNHYQMKNPNGPYPYTLKLCFSTAQHAS

SEQ ID NO: 285 - protein, 592 aa, Homo sapiens
MSIVIPLGVDTAETSYLEMAAGSEPESVEASPVVVEKSNSYPHQLYTSSSHHSHSYIGLPYADHNYGARPPPTPPASPPPSVLISKNEVGIFTTPNFDETSSATTISTSEDGSYGTDVTRCICGFTHDDGYMICCDKCSVWQHIDCMGIDRQHIPDTYLCERCQPRNLDKERAVLLQRRKRENMSDGDTSATESGDEVPVELYTAFQHTPTSITLTASRVSKVNDKKKKKSGEKEQHISKCKKGSAPEIDPSSDGSNFGWETKIKAWMDRYEEANNNQYSEGVQREAQRIALRLGNGNDKKEMNKSDLNTNNLLFKPPVESHIQKNKKILKSAKDLPPDALIIEYRGKFMLREQFEANGYFFKRPYPFVLFYSKFHGLEMCVDARTFGNEARFIRRSCTPNAEVRHEIQDGTIHLYIYSIHSIPKGTEITIAFDFDYGNCKYKVDCACLKENPECPVLKRSSESMENINSGYETRRKKGKKDKDISKEKDTQNQNITLDCEGTTNKMKSPETKQRKLSPLRLSVSNNQEPDFIDDIEEKTPISNEVEMESEEQIAERKRKMNWTVDGCGSWFWFRAEASVKALGLTLNVLFG

SEQ ID NO: 286 - protein, 605 aa, Homo sapiens
MSIVIPLGVDTAETSYLEMAAGSEPESVEASPVVVEKSNSYPHQLYTSSSHHSHSYIGLPYADHNYGARPPPTPPASPPPSVLISKNEVGIFTTPNFDETSSATTISTSEDGSYGTDVTRCICGFTHDDGYMICCDKCSVWQHIDCMGIDRQHIPDTYLCERCQPRNLDKERAVLLQRRKRENMSDGDTSATESGDEVPVELYTAFQHTPTSITLTASRVSKVNDKKKKKSGEKEQHISKCKKAFREGSRKSSRVKGSAPEIDPSSDGSNFGWETKIKAWMDRYEEANNNQYSEGVQREAQRIALRLGNGNDKKEMNKSDLNTNNLLFKPPVESHIQKNKKILKSAKDLPPDALIIEYRGKFMLREQFEANGYFFKRPYPFVLFYSKFHGLEMCVDARTFGNEARFIRRSCTPNAEVRHEIQDGTIHLYIYSIHSIPKGTEITIAFDFDYGNCKYKVDCACLKENPECPVLKRSSESMENINSGYETRRKKGKKDKDISKEKDTQNQNITLDCEGTTNKMKSPETKQRKLSPLRLSVSNNQEPDFIDDIEEKTPISNEVEMESEEQIAERKRKMNWTVDGCGSWFWFRAEASVKALGLTLNVLFG

SEQ ID NO: 287 - protein, 3118 aa, Homo sapiens
MRSRLPPALAALGAALLLSSIEAEVDPPSDLNFKIIDENTVHMSWAEPVDPIVGYRITVDPTTDGPTKEFTLSASTTETLLSELVPETEYVVTITSYDEVEESVPVIGQLTIQTGSSTKPVEKKPGKTEIQKCSVSAWTDLVFLVDGSWSVGRNNFKYILDFIAALVSAFDIGEEKTRVGVVQYSSDTRTEFNLNQYYQRDELLAAIKKIPYKGGNTMTGDAIDYLVKNTFTESAGARVGFPKVAIIITDGKSQDEVEIPARELRNVGVEVFSLGIKAADAKELKQIASTPSLNHVFNVANFDAIVDIQNEIISQVCSGVDEQLGELVSGEEVVEPPSNLIAMEVSSKYVKLNWNPSPSPVTGYKVILTPMTAGSRQHALSVGPQTTTLSVRDLSADTEYQISVSAMKGMTSSEPISIMEKTQPMKVQVECSRGVDIKADIVFLVDGSYSIGIANFVKVRAFLEVLVKSFEISPNRVQISLVQYSRDPHTEFTLKKFTKVEDIIEAINTFPYRGGSTNTGKAMTYVREKIFVPSKGSRSNVPKVMILITDGKSSDAFRDPAIKLRNSDVEIFAVGVKDAVRSELEAIASPPAETHVFTVEDFDAFQRISFELTQSICLRIEQELAAIKKKAYVPPKDLSFSEVTSYGFKTNWSPAGENVFSYHITYKEAAGDDEVTVVEPASSTSVVLSSLKPETLYLVNVTAEYEDGFSIPLAGEETTEEVKGAPRNLKVTDETTDSFKITWTQAPGRVLRCRIIYRPVAGGESREVTTPPNQRRRTLENLIPDTKYEVSVIPEYFSGPGTPLTGNAATEEVRGNPRDLRVSDPTTSTMKLSWSGAPGKVKQYLVTYTPVAGGETQEVTVRGDTTNTVLQGLKEGTQYALSVTALYASGAGDALFGEGTTLEERGSPQDLVTKDITDTSIGAYWTSAPGMVRGYRVSWKSLYDDVDTGEKNLPEDAIHTMIENLQPETKYRISVFATYSSGEGEPLTGDATTELSQDSKTLKVDEETENTMRVTWKPAPGKVVNYRVVYRPHGRGKQMVAKVPPTVTSTVLKRLQPQTTYDITVLPIYKMGEGKLRQGSGTTASRFKSPRNLKTSDPTMSSFRVTWEPAPGEVKGYKVTFHPTGDDRRLGELVVGPYDNTVVLEELRAGTTYKVNVFGMFDGGESSPLVGQEMTTLSDTTVMPILSSGMECLTRAEADIVLLVDGSWSIGRANFRTVRSFISRIVEVFDIGPKRVQIALAQYSGDPRTEWQLNAHRDKKSLLQAVANLPYKGGNTLTGMALNFIRQQNFRTQAGMRPRARKIGVLITDGKSQDDVEAPSKKLKDEGVELFAIGIKNADEVELKMIATDPDDTHDYNVADFESLSRIVDDLTINLCNSVKGPGDLEAPSNLVISERTHRSFRVSWTPPSDSVDRYKVEYYPVSGGKRQEFYVSRMETSTVLKDLKPETEYVVNVYSVVEDEYSEPLKGTEKTLPVPVVSLNIYDVGPTTMHVQWQPVGGATGYILSYKPVKDTEPTRPKEVRLGPTVNDMQLTDLVPNTEYAVTVQAVLHDLTSEPVTVREVTLPLPRPQDLKLRDVTHSTMNVFWEPVPGKVRKYIVRYKTPEEDVKEVEVDRSETSTSLKDLFSQTLYTVSVSAVHDEGESPPVTAQETTRPVPAPTNLKITEVTSEGFRGTWDHGASDVSLYRITWGPFGSSDKMETILNGDENTLVFENLNPNTIYEVSITAIYADESESDDLIGSERTLPILTTQAPKSGPRNLQVYNATSNSLTVKWDPASGRVQKYRITYQPSTGEGNEQTTTIGGRQNSVVLQKLKPDTPYTITVSSLYPDGEGGRMTGRGKTKPLNTVRNLRVYDPSTSTLNVRWDHAEGNPRQYKLFYAPAAGGPEELVPIPGNTNYAILRNLQPDTSYTVTVVPVYTEGDGGRTSDTGRTLMRGLARNVQVYNPTPNRLGVRWDPAPGPVLQYRVVYSPVDGTRPSESIVVPGNTRMVHLERLIPDTLYSVNLVALYSDGEGNPSPAQGRTLPRSGPRNLRVFGETTNSLSVAWDHADGPVQQYRIIYSPTVGDPIDEYTTVPGRRNNVILQPLQPDTPYKITVIAVYEDGDGGHLTGNGRTVGLLPPQNIHISDEWYTRFRVSWDPSPSPVLGYKIVYKPVGSNEPMEAFVGEMTSYTLHNLNPSTTYDVNVYAQYDSGLSVPLTDQGTTLYLNVTDLKTYQIGWDTFCVKWSPHRAATSYRLKLSPADGTRGQEITVRGSETSHCFTGLSPDTDYGVTVFVQTPNLEGPGVSVKEHTTVKPTEAPTEPPTPPPPPTIPPARDVCKGAKADIVFLTDASWSIGDDNFNKVVKFIFNTVGGFDEISPAGIQVSFVQYSDEVKSEFKLNTYNDKALALGALQNIRYRGGNTRTGKALTFIKEKVLTWESGMRKNVPKVLVVVTDGRSQDEVKKAALVIQQSGFSVFVVGVADVDYNELANIASKPSERHVFIVDDFESFEKIEDNLITFVCETATSSCPLIYLDGYTSPGFKMLEAYNLTEKNFASVQGVSLESGSFPSYSAYRIQKNAFVNQPTADLHPNGLPPSYTIILLFRLLPETPSDPFAIWQITDRDYKPQVGVIADPSSKTLSFFNKDTRGEVQTVTFDTEEVKTLFYGSFHKVHIVVTSKSVKIYIDCYEIIEKDIKEAGNITTDGYEILGKLLKGERKSAAFQIQSFDIVCSPVWTSRDRCCDIPSRRDEGKCPAFPNSCTCTQDSVGPPGPPGPAGGPGAKGPRGERGISGAIGPPGPRGDIGPPGPQGPPGPQGPNGLSIPGEQGRQGMKGDAGEPGLPGRTGTPGLPGPPGPMGPPGDRGFTGKDSAMGPRGPPGRPGSPGSPGVTGPSGKPGKPGDHGRPGPSGLKGEKGDRGDIASQNMMRAVARQVCEQLISGQMNRFNQMLNQIPNDYQSSRNQPGPPGPPGPPGSAGARGEPGPGGRPGFPGTPGMQGPPGERGLPGEKGERGTGSSGPRGLPGPPGPQGESRTGPPGSTGSRGPPGPPGRPGNSGIQGPPGPPGYCDSSQCASIPYNGQGYPEPYVPEGGAYLPEREPFIVPVEPERTAEYEDYGADEPAEEPPEPHRRWRRALPHGPGQ

SEQ ID NO: 288 - protein, 33 aa, Homo sapiens
MRKKQRKKAENSKNQNASSPPKEHNSSPAKEQN

SEQ ID NO: 289 - protein, 30 aa, Homo sapiens
MESCSVTQVGVQWHNQLTATPPPRFKRLSS

SEQ ID NO: 290 - protein, 52 aa, Homo sapiens
MQIKTKMRYHFTHSRMFIVKKDSKCWQICGEIEILTHCCWKCTMVQSLWKIV

SEQ ID NO: 291 - protein, 53 aa, Homo sapiens
MSSEPPPPPQPPTHQASVGLLDTPRSRERSPSPLRGNVVPSPLPTRRTRTFSA

SEQ ID NO: 292 - protein, 467 aa, Homo sapiens
MATGADVRDILELGGPEGDAASGTISKKDIINPDKKKSKKSSETLTFKRPEGMHREVYALLYSDKKDAPPLLPSDTGQGYRTVKAKLGSKKVRPWKWMPFTNPARKDGAMFFHWRRAAEEGKDYPFARFNKTVQVPVYSEQEYQLYLHDDAWTKAETDHLFDLSRRFDLRFVVIHDRYDHQQFKKRSVEDLKERYYHICAKLANVRAVPGTDLKIPVFDAGHERRRKEQLERLYNRTPEQVAEEEYLLQELRKIEARKKEREKRSQDLQKLITAADTTAEQRRTERKAPKKKLPQKKEAEKPAVPETAGIKFPDFKSAGVTLRSQRMKLPSSVGQKKIKALEQMLLELGVELSPTPTEELVHMFNELRSDLVLLYELKQACANCEYELQMLRHRHEALARAGVLGGPATPASGPGPASAEPAVTEPGLGPDPKDTIIDVVGAPLTPNSRKRRESASSSSSVKKAKKP

SEQ ID NO: 293 - protein, 500 aa, Homo sapiens
MATGADVRDILELGGPEGDAASGTISKKDIINPDKKKSKKSSETLTFKRPEGMHREVYALLYSDKKDAPPLLPSDTGQGYRTVKAKLGSKKVRPWKWMPFTNPARKDGAMFFHWRRAAEEGKDYPFARFNKTVQVPVYSEQEYQLYLHDDAWTKAETDHLFDLSRRFDLRFVVIHDRYDHQQFKKRSVEDLKERYYHICAKLANVRAVPGTDLAGHERRRKEQLERLYNRTPEQVAEEEYLLQELRKIPVFDAGHERRRKEQLERLYNRTPEQVAEEEYLLQELRKIEARKKEREKRSQDLQKLITAADTTAEQRRTERKAPKKKLPQKKEAEKPAVPETAGIKFPDFKSAGVTLRSQRMKLPSSVGQKKIKALEQMLLELGVELSPTPTEELVHMFNELRSDLVLLYELKQACANCEYELQMLRHRHEALARAGVLGGPATPASGPGPASAEPAVTEPGLGPDPKDTIIDVVGAPLTPNSRKRRESASSSSSVKKAKKP

SEQ ID NO: 294 - protein, 249 aa, Homo sapiens
MAAQSAPKVVLKSTTKMSLNERFTNMLKNKQPTPVNIRASMQQQQQLASARNRRLAQQMENRPSVQAALKLKQKSLKQRLGKSNIQARLGRPIGALARGAIGGRGLPIIQRGLPRGGLRGGRATRTLLRGGMSLRGQNLLRGGRAVAPRMGLRRGGVRGRGGPGRGGLGRGAMGRGGIGGRGRGMIGRGRGGFGGRGRGRGRGRGALARPVLTKEQLDNQLDAYMSKTKGHLDAELDAYMAQTDPETND

SEQ ID NO: 295 - protein, 275 aa, Homo sapiens
MSAEVKVTGQNQEQFLLLAKSAKGAALATLIHQVLEAPGVYVFGELLDMPNVRELAESDFASTFRLLTVFAYGTYADYLAEARNLPPLTEAQKNKLRHLSVVTLAAKVKCIPYAVLLEALALRNVRQLEDLVIEAVYADVLRGSLDQRNQRLEVDYSIGRDIQRQDLSAIARTLQEWCVGCEVVLSGIEEQVSRANQHKEQQLGLKQQIESEVANLKKTIKVTTAAAAAATSQDPEQHLTELREPAPGTNQRQPSKKASKGKGLRGSAKIWSKSN

SEQ ID NO: 296 - protein, 123 aa, Homo sapiens
MARYEEVSVSGFEEFHRAVEQHNGKTIFAYFTGSKDAGGKSWCPDCVQAEPVVREGLKHISEGCVFIYCQVGEKPYWKDPNNDFRKNLKVTAVPTLLKYGTPQKLVESECLQANLVEMLFSED

SEQ ID NO: 297 - protein, 50 aa, Homo sapiens
MAHCSLNLLGSSNPPASASQVAGTTGACHHTSLIFPFVLYVDSTGLTLKT

SEQ ID NO: 298 - protein, 98 aa, Homo sapiens
MPLIYINIILAFTISLLGILVYRSHLISSLLCLEGIILSLFIIATLITLNTHSLLANIVPIAILVFAACEAAVGLALLVSISNTYGLDYVHNLNLLQC

SEQ ID NO: 299 - protein, 368 aa, Homo sapiens; identical to SEQ ID NO: 191

SEQ ID NO: 300 - protein, 537 aa, Homo sapiens
MFNSRILTKYTLLLGQDENSVIKSFTASVDRKFISLMSLSSDGCIYETLIPIRPADPEKNQSLVKSLLLKAVVSGNARNGVALTALDQDHVAVLGSPLAASKECLSVWNIKFQTLQTSKELPQGTSGQLWYYGEHLFMLHGKSLTVIPYKCEVSSLAGALGKLKHSQDPGTHVVSHFVNWETPQGCGLGFQNSEQSRRILRRRKIEVSLQPEVPPSKQLLSTIMKDSEKHIEVEVRKFLALKQTPDFHTVIGDTVTGLLERCKAEPSFYPRNCLMQLIQTHVLSYSLCPDLMEIALKKKDVQLLQLCLQQFPDIPESVTCACLKIFLSIGDDSLQETDVNMESVFDYSINSVHDEKMEEQTEILQNGFNPEEDKCNNCDQELNKKPQDETKESTSCPVVQKRAALLNAILHSAYSETFLLPHLKDIPAQHITLFLKYLYFLYLKCSENATMTLPGIHPPTLNQIMDWICLLLDANFTVVVMMPEAKRLLINLYKLVKSQISVYSELNKIEVSFRELQKLNQEKNNRGLYSIEVLELF

SEQ ID NO: 301 - protein, 109 aa, Homo sapiens
MKTFRWKVKPGMDVASVPSVRKVRFGDGYSQRAPAGLNANLKTYSVTLSVPREEATVLESFLEEHGGWKSFLWTPPYEWRQIKVTCAKWSSRVSMLRVEFSAEFEQVVN

SEQ ID NO: 302 - protein, 127 aa, Homo sapiens
MRPLDIDEVEAPEEVEVLEPEEDFEQFLLPVINEMREDIASLIREHGRAYLRTRSKLWEMDNMLIQIKTQVEASEESALNHVQHPSGEADERVSELCEKAEEKAKEIAKMAEMLVELVWRIERSESS

SEQ ID NO: 303 - protein, 132 aa, Homo sapiens
MAKDILGEAGLHFDELNKLRVLDPEVTQQTIELKEECKDFVDKIGQFQKIVGGLIELVDQLAKEAENEKMKAIGARNLLKSIAKQREAQQQQLQALIAEKKMQLERYRVEYEALCKVEAEQNEFIDQFIFQK

SEQ ID NO: 304 - protein, 239 aa, Homo sapiens
MQDPNADTEWNDILRKKGILPPKESLKELEEEAEEEQRILQQSVVKTYEDMTLEELEDHEDEFNEEDERAIEMYRRRRLAEWKATKLKNKFGEVLEISGKDYVQEVTKAGEGLWVILHLYKQGIPLCALINQHLSGLARKFPDVKFIKAISTTCIPNYPDRNLPTIFVYLEGDIKAQFIGPLVFGGMNLTRDELEWKLSESGAIMTDLEENPKKPIEDVLLSSVRRSVLMKRDSDSEGD

SEQ ID NO: 305 - protein, 68 aa, Homo sapiens
MTRQEELAAARAALHDLMTGKRVATVQKDGRRVEFTATSVSDLKKYIAELEVQTGMTQRRRGPAGFYV

SEQ ID NO: 306 - protein, 39 aa, Homo sapiens
MFGDDCHQLCDCEGETFCHPKTEKCLCPRGRTGARCDAG

SEQ ID NO: 307 - protein, 122 aa, Homo sapiens
MTTATRQEVLGLYRSIFRLARKWQATSGQMEDTIKEKQYILNEARTLFRKNKNLTDTDLIKQCIDECTARIEIGLHYKIPYPRPIHLPPMGLTPLRGRGLRSQEKLRKLSKPVYLRSHDEVS

SEQ ID NO: 308 - protein, 335 aa, Homo sapiens
MAPPRIGTHNGTFHCDEALACALLRLLPEYRDAEIVRTRDPEKLASCDIVVDVGGEYHPRRHRYDHHQRSFTETMSSLSPGKPWQTKLSSAGLIYLHFGHKLLAQLLGTSEEDSMVGTLYDKMYENFVEEVDAVDNGISQWAEGEPRYALTTTLSARVARLNPTWNHPDQDTEAGFKRAMDLVQEEFLQRLDFYQHSWLPARALVEEALAQRFQVDPSGEIVELAKGACPWKEHLYHLESGLSPPVAIFFVIYTDQAGQWRIQCVPKEPHSFQSRLPLPEPWRGLRDEALDQVSGIPGCIFVHASGFIGGHRTREGALSMARATLAQRSYLPQIS

SEQ ID NO: 309 - protein, 426 aa, Homo sapiens
MNSVYSYHSYYAQPSLTSVNGFHSKYALPSFSYCGFPSSNPVFPSQFLGPGAWGHSGSSGSFEKKPDLHALHNSLSPAYGGAEFAELPSQAVPTDAHHPTPHHQQPAYPGPKEYLLPKAPLLHSVSRDPSPFAQSSNCYNRSIKQEPVDPLTQAEPVPRDAGKMGKTPLSEVSQNGGPSHLWGQYSGGPSMSPKRTNGVGGSWGVFSSGESPAIVPDKLSSFGASCLAPSHFTDGQWGLFPGEGQQAASHSGGRLRGKPWSPCKFGNSTSALAGPSLTEKPWALGAGDFNSALKGSPGFQDKLWNPMKGEEGRIPAAGASQLVFYQHKNLNQPNHGLALWEAKMKQLAERARARQEEAARLGLGQQEAKLYGKKRKWGGTVVAEPQQKEKKGVVPTRQALAVPTDSAVTVSSYAYTKVTGPYSRWI

SEQ ID NO: 310 - protein, 217 aa, Homo sapiens
MCSEIILRQEVLKDGFHRDLLIKVKFGESIEDLHTCRLLIKQDIPAGLYVDPYELASLRERNITEAVMVSENFDIEAPNYLSKESEVLIYARRDSQCIDCFQAFLPVHCRYHRPHSEDGEASIVVNNPDLLMFCDQEFPILKCWAHSEVAAPCALENEDICQWNKMKYKSVYKNVILQVPVGLTVHTSLVCSVTLLITILCSTLILVAVFKYGHFSL

SEQ ID NO: 311 - protein, 109 aa, Homo sapiens
MWKPMPSPSNMKASAALLCLLLTAAAFSPQGLAQPVGINTSTTCCYRFINKKIPKQRLESYRRTTSSHCPREAVIFKTKLDKEICADPTQKWVQDFMKHLDKKTQTPKL

SEQ ID NO: 312 - protein, 206 aa, Homo sapiens
MKLIVGIGGMTNGGKTTLTNSLLRALPNCCVIHQDDFFKPQDQIAVGEDGFKQWDVLESLDMEAMLDTVQAWLSSPQKFARAHGVSVQPEASDTHILLLEGFLLYSYNTRNYTVPDPPGLFDGHVWPMYQKYRQEMEANGVEVVYLDGMKSREELFREVLEDIQNSLLNRSQESAPSPARPARTQGPGRGCGHRTARPAASQQDSM

SEQ ID NO: 313 - protein, 193 aa, Homo sapiens
MSSIGTGYDLSASTFSPDGRVFQVEYAMKAVENSSTAIGIRCKDGVVFGVEKLVLSKLYEEGSNKRLFNVDRHVGMAVAGLLADARSLADIAREEASNFRSNFGYNIPLKHLADRVAMYVHAYTLYSAVRPFGCRIYIVHDEVKDKAFELELSWVGELTNGRHEIVPKDIREEAEKYAKESLKEEDESDDDNM

SEQ ID NO: 314 - protein, 723 aa, Homo sapiens
MQNSEGGADSPASVALRPSAAAPPVPASPQRVLVQAASSNPKGAQMQPISLPRVQQVPQQVQPVQHVYPAQVQYVEGGDAVYTNGAIRTAYTYNPEPQMYAPSSTASYFEAPGGAQVTVAASSPPAVPSHSMVGITMDVGGSPIVSSAGAYLIHGGMDSTRHSLAHTSRSSPATLEMAIENLQKSEGITSHKSGLLNSHLQWLLDNYETAEGVSLPRSSLYNHYLRHCQEHKLDPVNAASFGKLIRSVFMGLRTRRLGTRGNSKYHYYGIRLKPDSPLNRLQEDTQYMAMRQQPMHQKPRYRPAQKTDSLGDSGSHSGLHSTPEQTMAVQSQHHQQYIDVSHVFPEFPAPDLGSFLLQDGVTLHDVKALQLVYRRHCEATVDVVMNLQFHYIEKLWLSFWNSKASSSDGPTSLPASDEDPEGAVLPKDKLISLCQCDPILRWMRSCDHILYQALVEILIPDVLRPVPSTLTQAIRNFAKSLEGWLTNAMSDFPQQVIQTKVGVVSAFAQTLRRYTSLNHLAQAARAVLQNTSQINQMLSDLNRVDFANVQEQASWVCQCEESVVQRLEQDFKLTLQQQSSLDQWASWLDSVVTQVLKQHAGSPSFPKAARQFLLKWSFYSSMVIRDLTLRSAASFGSFHLIRLLYDEYMFYLVEHRVAEATGETPIAVMGEFNDLASLSLTLLDKDDMGDEQRGSEAGPDARSLGEPLVKRERSDPNHSLQGI

SEQ ID NO: 315 - protein, 725 aa, Homo sapiens
MESGRGSSTPPGPIAALGMPDTGPGSSSLGKLQALPVGPRAHCGDPVSLAAAGDGSPDIGPTGELSGSLKIPNRDSGIDSPSSSVAGENFPCEEGLEAGPSPTVLGAHAEMALDSQVPKVTPQEEADSDVGEEPDSENTPQKADKDAGLAQHSGPQKLLHIAQELLHTEETYVKRLHLLDQVFCTRLTDAGIPPEVIMGIFSNISSIHRFHGQFLLPELKTRITEEWDTNPRLGDILQKLAPFLKMYGEYVKNFDRAVGLVSTWTQRSPLFKDVVHSIQKQEVCGNLTLQHHMLEPVQRVPRYELLLKDYLKRLPQDAPDRKDAERSLELISTAANHSNAAIRKVEKMHKLLEVYEQLGGEEDIVNPANELIKEGQIQKLSAKNGTPQDRHLFLFNSMILYCVPKLRLMGQKFSVREKMDISGLQVQDIVKPNTAHTFIITGRKRSLELQTRTEEEKKEWIQIIQATIEKHKQNSETFKAFGGAFSQDEDPSLSPDMPITSTSPVEPVVTTEGSSGAAGLEPRKLSSKTRRDKEKQSCKSCGETFNSITKRRHHCKLCGAVICGKCSEFKAENSRQSRVCRDCFLTQPVAPESTEKTPTADPQPSLLCGPLRLSESGETWSEVWAAIPMSDPQVLHLQGGSQDGRLPRTIPLPSCKLSVPDPEERLDSGHVWKLQWAKQSWYLSASSAELQQQWLETLSTAAHGDTAQDSPGALQLQVPMGAAAP

SEQ ID NO: 316 - protein, 558 aa, Homo sapiens
MAELNTHVNVKEKIYAVRSVVPNKSNNEIVLVLQQFDFNVDKAVQAFVDGSAIQVLKEWNMTGKKKNNKRKRSKSKQHQGNKDAKDKVERPEAGPLQPQPPQIQNGPMNGCEKDSSSTDSANEKPALIPREKKISILEEPSKALRGVTEGNRLLQQKLSLDGNPKPIHGTTERSDGLQWSAEQPCNPSKPKAKTSPVKSNTPAAHLEIKPDELAKKRGPNIEKSVKDLQRCTVSLTRYRVMIKEEVDSSVKKIKAAFAELHNCIIDKEVSLMAEMDKVKEEAMEILTARQKKAEELKRLTDLASQMAEMQLAELRAEIKHFVSERKYDEELGKAARFSCDIEQLKAQIMLCGEITHPKNNYSSRTPCSSLLPLLNAHAATSGKQSNFSRKSSTHNKPSEGKAANPKMVSSLPSTADPSHQTMPANKQNGSSNQRRRFNPQYHNNRLNGPAKSQGSGNEAEPLGKGNSRHEHRRQPHNGFRPKNKGGAKNQEASLGMKTPEAPAHSEKPRRRQHAADTSEARPFRGSVGRVSQCNLCPTRIEVSTDAAVLSVPAVTLVA

SEQ ID NO: 317 - protein, 489 aa, Homo sapiens
MAELNTHVNVKEKIYAVRSVVPNKSNNEIVLVLQQFDFNVDKAVQAFVDGSAIQVLKEWNMTGKKKNNKRKRSKSKQHQGNKDAKDKVERPEAGPLQPQPPQIQNGPMNGCEKDSSSTDSANEKPALIPREKKISILEEPSKALRGVTGPNIEKSVKDLQRCTVSLTRYRVMIKEEVDSSVKKIKAAFAELHNCIIDKEVSLMAEMDKVKEEAMEILTARQKKAEELKRLTDLASQMAEMQLAELRAEIKHFVSERKYDEELGKAARFSCDIEQLKAQIMLCGEITHPKNNYSSRTPCSSLLPLLNAHAATSGKQSNFSRKSSTHNKPSEGKAANPKMVSSLPSTADPSHQTMPANKQNGSSNQRRRFNPQYHNNRLNGPAKSQGSGNEAEPLGKGNSRHEHRRQPHNGFRPKNKGGAKNQEASLGMKTPEAPAHSEKPRRRQHAADTSEARPFRGSVGRVSQCNLCPTRIEVSTDAAVLSVPAVTLVA

SEQ ID NO: 318 - protein, 115 aa, Homo sapiens
MMGQEKVPIKQVPGGVKQLEPPKEGERRTTHNIIEKRYRSSINDKIIELKDLVMGTDAKMHKSGVLRKAIDYTRCLKGLHGFPALPGSGQLGKGHSSSSAALQSLGAGRAGHVEP

SEQ ID NO: 319 - protein, 911 aa, Homo sapiens
MVFLQNHVRFFLESLPAFLRVLIQAGALCWSLPELSQGEVGKGACPAEVGKHRDHLPSSDPVLMQAEASVVMCWVSSEDRSALWALVTFYGGDCQLTLNKKCTHLIVPEPKGGKYECALKRASIKIVTPDWVLDCVSEKTKKDEAFYHPRLIIYEEEEEEEEEEEEVENEEQDSQNEGSTDEKSSPASSQEGSPSGDQQFSPKSNTEKSKGELMFDDSSDSSPEKQERNLNWTPAEVPQLAAAKRRLPQGKEPGLINLCANVPPVPGNILPPEVRGNLMAAGQNLQSSERSEMIATWSPAVRTLRNITNNADIQQMNRPSNVAHILQTLSAPTKNLEQQVNHSQQGHTNANAVLFSQVKVTPETHMLQQQQQAQQQQQQHPVLHLQPQQIMQLQQQQQQQISQQPYPQQPPHPFSQQQQQQQQPPPSPQQHQLFGHDPAVEIPEEGFLLGCVFAIADYPEQMSDKQLLATWKRIIQAHGGTVDPTFTSRCTHLLCESQVSSAYAQAIRERKRCVTAHWLNTVLKKKKMVPPHRALHFPVAFPPGGKPCSQHIISVTGFVDSDRDDLKLMAYLAGAKYTGYLCRSNTVLICKEPTGLKYEKAKEWRIPCVNAQWLGDILLGNFEALRQIQYSRYTAFSLQDPFAPTQHLVLNLLDAWRVPLKVSAELLMSIRLPPKLKQNEVANVQPSSQRARIEDVPPPTKKLTPELTPFVLFTGFEPVQVQQYIKKLYILGGEVAESAQKCTHLIASKVTRTVKFLTAISVVKHIVTPEWLEECFRCQKFIDEQNYILRDAEAEVLFSFSLEESLKRAHVSPLFKAKYFYITPGICPSLSTMKAIVECAGGKVLSKQPSFRKLMEHKQNSSLSEIILISCENDLHLCREYFARGIDVHNAEFVLTGVLTQTLDYESYKFN

SEQ ID NO: 320 - protein, 71 aa, Homo sapiens [sequence omitted]

SEQ ID NO: 321 - protein, 205 aa, Homo sapiens
MSGRSGYRLSLLLLAALGSGRAERDCRVSSFRVKENFDKARFSGTWYAMAKKDPEGLFLQDNIVAEFSVDETGQMSATAKGRVRLLNNWDVCADMVGTFTDTEDPAKFKMKYWGVASFLQKGNDDHWIVDTDYDTYAVQYSCRLLNLDGTCADSYSFVFSRDPNGLPPEAQKIVRQRQEELCLARQYRLIVHNGYCDGRSERNLL

SEQ ID NO: 322 - protein, 837 aa, Homo sapiens
MAAPGAPAEYGYIRTVLGQQILGQLDSSSLALPSEAKLKLAGSSGRGGQTVKSLRIQEQVQQTLARKGRSSVGNGNLHRTSSVPEYVYNLHLVENDFVGGRSPVPKTYDMLKAGTIATYEGRWGRGTAQYSSQKSVEERSLRHPLRRLEISPDSSPERAHYTHSDYQYSQRSQAGHTLHHQESRRAALLVPPRYARSEIVGVSRAGTTSRQRHFDTYHRQYQHGSVSDTVFDSIPANPALLTYPRPGTSRSMGNLLEKENYLTAGLTVGQVRPLVPLQPVTQNRASRSSWHQSSFHSTRTLREAGPSVAVDSSGRRAHLTVGQAAAGGSGNLLTERSTFTDSQLGNADMEMTLERAVSMLEADHMPPSRISAAATFIQHECFQKSEARKRVNQLRGILKLLQLLKVQNEDVQRAVCGALRNLVFEDNDNKLEVAELNGVPRLLQVLKQTRDLETKKQITGLLWNLSSNDKLKNLMITEALLTLTENIIIPFSGWPEGDYPKANGLLDFDIFYNVTGCLRNMSSAGADGRKAMRRCDGLIDSLVHYVRGTIADYQPDDKATENCVCILHNLSYQLEAELPEKYSQNIYIQNRNIQTDNNKSIGCFGSRSRKVKEQYQDVPMPEEKSNPKGVEWLWHSIVIRMYLSLIAKSVRNYTQEASLGALQNLTAGSGPMPTSVAQTVVQKESGLQHTRKMLHVGDPSVKKTAISLLRNLSRNLSLQNEIAKETLPDLVSIIPDTVPSTDLLIETTASACYTLNNIIQNSYQNARDLLNTGGIQKIMAISAGDAYASNKASKAASVLLYSLWAHTELHHAYKKAQFKKTDFVNSRTAKAYHSLKD

SEQ ID NO: 323 - protein, 223 aa, Homo sapiens
MAATHTPPLASPGMARICLYGDLQRFGRRIDLRVKTGAEAIRALATQLPAFRQKLSDGWYQVRIAGRDVSTSGLTAQLHETLPDGAVIHIVPRVAGAKSGGVFQIVLGAAAIAGSFFTAGATLAAWGAAIGAGGMTGILFSLGASMVLGGVAQMLAPKARTPRIQTTDNGKQNTYFSSLDNMVAQGNVLPVLYGEMRVGSRVVSQEISTADEGDGGQVVVIGR

SEQ ID NO: 324 - protein, 217 aa, Homo sapiens [sequence omitted]

SEQ ID NO: 325 - protein, 372 aa, Homo sapiens
MSEAGEATTTTTTTLPQAPTEAAAAAPQDPAPKSPVGSGAPQAAAPAPAAHVAGNPGGDAAPAATGTAAAASLATAAGSEDAEKKVLATKVLGTVKWFNVRNGYGFINRNDTKEDVFVHQTAIKKNNPRKYLRSVGDGETVEFDVVEGEKGAEAANVTGPDGVPVEGSRYAADRRRYRRGYYGRRRGPPRNYAGEEEEEGSGSSEGFDPPATDRQFSGARNQLRRPQYRPQYRQRRFPPYHVGQTFDRRSRVLPHPNRIQAGEIGEMKDGVPEGAQLQGPVHRNPTYRPRYRSRGPPRPRPAPAVGEAEDKENQQATSGPNQPSVRRGYRRPYNYRRRPRPPNAPSQDGKEAKAGEAPTENPAPPTQQSSAE

SEQ ID NO: 326 - protein, 303 aa, Homo sapiens
MSEAGEATTTTTTTLPQAPTEAAAAAPQDPAPKSPVGSGAPQAAAPAPAAHVAGNPGGDAAPAATGTAAAASLATAAGSEDAEKKVLATKVLGTVKWFNVRNGYGFINRNDTKEDVFVHQTAIKKNNPRKYLRSVGDGETVEFDVVEGEKGAEAANVTGPDGVPVEGSRYAADRRRYRRGYYGRRRGPPRNAGEIGEMKDGVPEGAQLQGPVHRNPTYRPRYRSRGPPRPRPAPAVGEAEDKENQQATSGPNQPSVRRGYRRPYNYRRRPRPPNAPSQDGKEAKAGEAPTENPAPPTQQSSAE

SEQ ID NO: 327 - protein, 103 aa, Homo sapiens
MSEEKPKEGVKTENDHINLKVAGQDGSVVQFKIKRHTPLSKLMKAYCERQGLSMRQIRFRFDGQPINETDTPAQLEMEDEDTIDVFQQQTGGVPESSLAGHSF

SEQ ID NO: 328 - protein, 416 aa, Homo sapiens
MAEEQGRERDSVPKPSVLFLHPDLGVGGAERLVLDAALALQARGCSVKIWTAHYDPGHCFAESRELPVRCAGDWLPRGLGWGGRGAAVCAYVRMVFLALYVLFLADEEFDVVVCDQVSACIPVFRLARRRKKILFYCHFPDLLLTKRDSFLKRLYRAPIDWIEEYTTGMADCILVNSQFTAAVFKETFKSLSHIDPDVLYPSLNVTSFDSVVPEKLDDLVPKGKKFLLLSINRYERKKNLTLALEALVQLRGRLTSQDWERVHLIVAGGYDERVLENVEHYQELKKMVQQSDLGQYVTFLRSFSDKQKISLLHSCTCVLYTPSNEHFGIVPLEAMYMQCPVIAVNSGGPLESIDHSVTGFLCEPDPVHFSEAIEKFIREPSLKATMGLAGRARVKEKFSPEAFTEQLYRYVTKLLV

SEQ ID NO: 329 - protein, 197 aa, Homo sapiens
MEEEEIRTWSFPGANPRGGHQCGSALSCDEGVPAAQGASSEKPHECTKCGKALCCRSDLRVHHGVHAGEKSSACSERGSGFREKLCPDKQGTHTKEKPARDSRSGKTIFRKTRLCVPGTVHAGAKPYKCWECEKTSHKSRLIEHLRSHTGEKPCGCRECGKAFFQKSHLILRQRTHTGEKPCDCAECGKAAPRTPAS

SEQ ID NO: 330 - protein, 341 aa, Homo sapiens
MSMYTTAQLLAANEQKFKFDPLFLRLFFRESYPFTTEKVYLSQIPGLVNMALYVSPIVSGEVIRSRGGSTSEFTPGYVKPKHEVNPQMTLRRLPDEDPQNLADPAYRRRRIIMQNMRDEELAIAQVEEMQAVSAVLKGKYTMTGEAFDPVEVDMGRSEENNITQSGGTEWSKRDKSTYDPTDDIEAYALNASGVVNIIVFDPKGWALFRSFKAVKEKLDTRRGSNSELETAVKDLGKAVSYKGMYGDVAIVVYSGQYVENGVKKNFLPDNTMVLGNTQARGLRTYGCIQDADAQREGINASARYPKNWVTTGDPAREFTMIQSAPLMLLADPDEFVSVQLA

SEQ ID NO: 331 - protein, 77 aa, Homo sapiens
MKMRKNQCKKAENSKNQNGSSPAKDYNSSPAREQNWMENWLDKLTEVGFIRWIITNSFKLKEHVLTQCKELRSLKKS

SEQ ID NO: 332 - protein, 187 aa, Homo sapiens
MERQEESLSARPALETEGLRFLHTTVGSLLATYGWYIVFSCILLYVVFQKLSARLRALRQRQLDRAAAAVEPDVVVKRQEALAAARLKMQEELNAQVEKHKEKLKQLEEEKRRQKIEMWDSMQEGKSYKGNAKKPQEEDSPGPSTSSVLKRKSDRKPLRGGGYNPLSGEGGGACSWRPGRRGPSSGG

SEQ ID NO: 333 - protein, 265 aa, Homo sapiens
MSEKRRRLDARNPLKQETALSRLPFPRGNQGLLQKAEAGRARWLTPVIPALWKTEAGGSPEKMTQDRPLLAVQEALKKCFPVVEEQQGLWQSALRDCQPLLSSLSNLAEQLQAAQNLRFEDVPALRAFPDLKERLRRKQLVAGDIVLDKLGERLAILLKVRDMVSSHVERVFQIYEQHADTVGIDAVLQPSAVSPSVADMLEWLQDIERHYRKSYLKRKYLLSSIQWGDLANIQALPKAWDRISKDEHHDLVQDILLNVSFFLEE

SEQ ID NO: 334 - protein, 327 aa, Homo sapiens
MRALPGLLEARARTPRLLLLQCLLAAARPSSADGSAPDSPFTSPPLREEIMANNFSLESHNISLTEHSSMPVEKNITLERPSNVNLTCQFTTSGDLNAVNVTWKKDGEQLENNYLVSATGSTLYTQYRFTIINSKQMGSYSCFFREEKEQRGTFNFKVPELHGKNKPLISYVGDSTVLTCKCQNCFPLNWTWYSSNGSVKVPVGVQMNKYVINGTYANETKLKITQLLEEDGESYWCRALFQLGESEEHIELVVLSYLVPLKPFLVIVAEVILLVATILLCEKYTQKKKKHSDEGKEFEQIEQLKSDDSNGIENNVPRHRKNESLGQ

SEQ ID NO: 335 - protein, 360 aa, Homo sapiens
MNYTESSPLRESTAIGFTPELESIIPVPSNKTTCENWREIHHLVFHVANICFAVGLVIPTTLHLHMIFLRGMLTLGCTLYIVWATLYRCALDIMIWNSVFLGVNILHLSYLLYKKRPVKIEKELSGMYRRLFEPLRVPPDLFRRLTGQFCMIQTLKKGQTYAAEDKTSVDDRLSILLKGKMKVSYRGHFLHNIYPCAFIDSPEFRSTQMHKGEKFQVTIIADDNCRFLCWSRERLTYFLESEPFLYEIFRYLIGKDITNKLYSLNDPTLNDKKAKKLEHQLSLCTQISMLEMRNSIASSSDSDDGLHQFLRGTSSMSSLHVSSPHQRASAKMKPIEEGAEDDDDVFEPASPNTLKVHQLP

SEQ ID NO: 336 - protein, 305 aa, Homo sapiens
MGTEKESPEPDCQKQFQAAVSVIQNLPKNGSYRPSYEEMLRFYSYYKQATMGPCLVPRPGFWDPIGRYKWDAWNSLGKMSREEAMSAYITEMKLVAQKVIDTVPLGEVAEDMFGYFEPLYQVIPDMPRPPETFLRRVTGWKEQVVNGDVGAVSEPPCLPKEPAPPSPESHSPRDLDSEVFCDSLEQLEPELVWTEQRAASGGKRDPRNSPVPPTKKEGLRGSPPGPQELDVWLLGTVRALQESMQEVQARVQSLESMPRPPEQRPQPRPSARPWPLGLPGPALLFFLLWPFVVQWLFRMFRTQKR

SEQ ID NO: 337 - protein, 253 aa, Homo sapiens
MNFSGGGRQEAAGSRGRRAPRPREQDRDVQLSKALSYALRHGALKLGLPMGADGFVPLGTLLQLPQFRGFSAEDVQRVVDTNRKQRFALQLGDPSTGLLIRANQGHSLQVPKLELMPLETPQALPPMLVHGTFWKHWPSILLKGLSCQGRTHIHLAPGLPGDPGIISGMRSHCEIAVFIDGPLALADGIPFFRSANGVILTPGNTDGFLLPKYFKEALQLRPTRKPLSLAGDEETECQSSPKHSSRERRRIQQ

SEQ ID NO: 338 - protein, 264 aa, Homo sapiens
MGGGKSGTVSSQKQPASKTASDKTDSALNTATEIKDGLQCGTVSSQKQQALKATTDEEGSVSNIATEIKDGEKSGTVSSQKKPALKATSDEKDSFSNITREKKDGEISRTVSSQKPPALKATSVKEDSVLNIAREKKDGEKSRTVSFDQPPGLKATRDEKDSLLNIARGKEDGEKTRRVSSRKKPALKATSDEKDSFSNITREKKDGETSRTVSSQKPPALKATSDEEDSVLSIAREEKDGEKSRTVSSEQPPGLKCLLGKKQP

SEQ ID NO: 339 - protein, 299 aa, Homo sapiens
MVDKKLVVVFGGTGAQGGSVARTLLEDGTFKVRVVTRNPRKKAAKELRLQGAEVVQGDQDDQVIMELALNGAYATFIVTNYWESCSQEQEVKQGKLLADLARRLGLHYVVYSGLENIKKLTAGRLAAAHFDGKGEVEEYFRDIGVPMTSVRLPCYFENLLSHFLPQKAPDGKSYLLSLPTGDVPMDGMSVSDLGPVVLSLLKMPEKYVGQNIGLSTCRHTAEEYAALLTKHTRKVVHDAKMTPEDYEKLGFPGARDLANMFRFYALRPDRDIELTLRLNPKALTLDQWLEQHKGDFNLL

SEQ ID NO: 340 - protein, 782 aa, Homo sapiens
MAPHRPAPALLCALSLALCALSLPVRAATASRGASQAGAPQGRVPEARPNSMVVEHPEFLKAGKEPGLQIWRVEKFDLVPVPTNLYGDFFTGDAYVILKTVQLRNGNLQYDLHYWLGNECSQDESGAAAIFTVQLDDYLNGRAVQHREVQGFESATFLGYFKSGLKYKKGGVASGFKHVVPNEVVVQRLFQVKGRRVVRATEVPVSWESFNNGDCFILDLGNNIHQWCGSNSNRYERLKATQVSKGIRDNERSGRARVHVSEEGTEPEAMLQVLGPKPALPAGTEDTAKEDAANRKLAKLYKVSNGAGTMSVSLVADENPFAQGALKSEDCFILDHGKDGKIFVWKGKQANTEERKAALKTASDFITKMDYPKQTQVSVLPEGGETPLFKQFFKNWRDPDQTDGLGLSYLSSHIANVERVPFDAATLHTSTAMAAQHGMDDDGTGQKQIWRIEGSNKVPVDPATYGQFYGGDSYIILYNYRHGGRQGQIIYNWQGAQSTQDEVAASAILTAQLDEELGGTPVQSRVVQGKEPAHLMSLFGGKPMIIYKGGTSREGGQTAPASTRLFQVRANSAGATRAVEVLPKAGALNSNDAFVLKTPSAAYLWVGTGASEAEKTGAQELLRVLRAQPVQVAEGSEPDGFWEALGGKAAYRTSPRLKDKKMDAHPPRLFACSNKIGRFVIEEVPGELMQEDLATDDVMLLDTWDQVFVWVGKDSQEEEKTEALTSAKRYIETDPANRDRRTPITVVKQGFEPPSFVGWFLGWDDDYWSVDPLDRAMAELAA

SEQ ID NO: 341 - protein, 255 aa, Homo sapiens
MVKLTAELIEQAAQYTNAVRDRELDLRGYKIPVIENLGATLDQFDAIDFSDNEIRKLDGFPLLRRLKTLLVNNNRICRIGEGLDQALPCLTELILTNNSLVELGDLDPLASLKSLTYLSILRNPVTNKKHYRLYVIYKVPQVRVLDFQKVKLKERQEAEKMFKGKRGAQLAKDIARRSKTFNPGAGLPTDKKKGGPSPGDVEAIKNAIANASTLAEVERLKGLLQSGQIPGRERRSGPTDDGEEEMEEDTVTNGS

SEQ ID NO: 342 - protein, 270 aa, Homo sapiens
MLSLRVPLAPITDPQQLQLSPLKGLSLVDKENTPPALSGTRVLASKTARRIFQEPTEPKTKAAAPGVEDEPLLRENPRRFVIFPIEYHDIWQMYKKAEASFWTAEEVDLSKDIQHWESLKPEERYFISHVLAFFAASDGIVNENLVERFSQEVQITEARCFYGFQIAMENIHSEMYSLLIDTYIKDPKEREFLFNAIETMPCVKKKADWALRWIGDKEATYGERVVAFAAVEGIFFSGSFASIFWLKKRGLMPGLTFSNELISRDEGFTL

SEQ ID NO: 343 - protein, 63 aa, Homo sapiens
MAAATLTSKLYSLLFRRTSTFALTIIVGVMFFERAFDQGADAIYDHINEGKLWKHIKHKYENK

SEQ ID NO: 344 - protein, 299 aa, Homo sapiens
MEHFDASLSTYFKALLGPRDTRVKGWFLLDNYIPTFICSVIYLLIVWLGPKYMRNKQPFSCRGILVVYNLGLTLLSLYMFCELVTGVWEGKYNFFCQGTRTAGESDMKIIRVLWWYYFSKLIEFMDTFFFILRKNNHQITVLHVYHHASMLNIWWFVMNWVPCGHSYFGATLNSFIHVLMYSYYGLSSVPSMRPYLWWKKYITQGQLLQFVLTIIQTSCGVIWPCTFPLGWLYFQIGYMISLIALFTNFYIQTYNKKGASRRKDHLKDHQNGSMAAVNGHTNSFSPLENNVKPRKLRKD

SEQ ID NO: 345 - DNA, 359 bp, Homo sapiens
attttccttcctagtagaagtgttactgcctgtaactagctcaaaataccaatgcagtttctgcattctgggttttggttttccttttttgttttttttggtttttgaaaatttggttttggcccccaaggtggaagacaagggggaaaacaaaacaaaaggggaaaaattgccccccgggaaaaaaaaaatccccggcccaaacccccaggaaaaccgggaaaaaaagggcccccccaaaaccctaaaaaaatttgggaatttaaaaaaaaaagggggtaaaacaagggggccaaggggggaaaaaaactccgacccaaagggaacccccgggcaaaaccctggaaataaaaaaaaaa

SEQ ID NO: 346 - DNA, 371 bp, Homo sapiens
aatttacccctgacgcggcggcggccgacgggaagctgggtgtgcttaggtcgtggtggccccggtggtggtgggctccgggcgggctcgcgtcatcctgcccccgctgcgatgcattcgcggcgcccggacggatttgatggcttgggctaccggggtggtgcccgggacgagcagggttttggcggcgccttccctgcaaggtccttcatcaccgggtcggacctgggccactgggtgacgactctgacagatatcgcccggcaggcgcaactctgcactgtggcgtgaagagcccgccctacggcgtgcccaccaactgcaccccgtacgaaggccccacggaggatccctttgacagtggcagtggg

SEQ ID NO: 347 - DNA, 381 bp, Homo sapiens
gaataaactaaactacttaccatgcatgacccataaaaatctaactgctcctccctgatctttccagcttcgccttactcctgtctcctctttacttactaccctgcatctaagatggcttccctttgagtttctacaatacaccaaaatctcctacctcagagattttgttccctctatctgaaatactcttctctggaccctttggctggctggctgctccttcatgttttgggttcagttgtcacttccttaaaaaagggtttcttgggccgggcacagtggctcacagctgtaatcccagcactttgggaggccgaggtgggtggatcataaggtcaggagatcaagaccatcctggccaacacggtgaaaccttgg

SEQ ID NO: 348 - DNA, 411 bp, Homo sapiens
  misc_feature (1)...(411): n = a,t,c or g
atacacgcgctggcttctggcatgggcactgtcttttccttaaggtgaagctcagagagtggtcgtgggcgagggccgacaggcatctctggctcctcctcatcctcttctcctgtagattctggggtggggtaggggctcttatcctcattttcattgggctggagggcatccatgttgatcttggaggcgggtggagactctccgtcagccgtgatggatttcagctcaatcttctcctccttggattcccccactgccggctcatccaccaaactcttgcttcttctctgggctggcagtcccgggcagcttctttctctcattctcctcttcctcctccctttgggcacaagcgaggctctccacattagaccaggtgtccacacgcaatggccctcaatccactcn

SEQ ID NO: 349 - DNA, 451 bp, Homo sapiens
aaaattaacactgagttacaaactgaagtggcaatgttgaaatccatggttctgtggttaggagaacaggtacaaagcttgcagttgcagcagcaattgcgtcatcattttaatcacattcatatttgcgtaactaactcagaatataaccaaagtgagtatccgtgggaccttgtgaaagcccatttgcaaggagctttcacatccaacatcacctttgatactggtgaattccaaaacactattattgattcaactaagtgaccgcatgatttataggcttctttagatgactgctcctgaatttaggatggcctgtccatactcgcctctgtacttatgttagctgcccctgtcctggcacttcaaactccgtcttggatgctatttatggctcttcctgtatccctctcacgtctgaaggcctactttctggtctcagtcttatccc

SEQ ID NO: 350 - DNA, 549 bp, Homo sapiens
  misc_feature (1)...(549): n = a,t,c or g
tgcatggccnggagggctgggccgctcgagcacgatgattgagtcacgatntgcagggtccacccacgcgtccgattaaatcctgcatgtaatatatctgctgtcatcttagttggaccaacttcccatttatttatcttaaaactatacagttacgtcttaattccatccaaagaagatacagtttgaagacagaagtgtactctctacaatgcaatttactgtacagttagaaagcaaagtgttaaatggagaagatacttggatttattaaacattgtgagatgtaaagatgctacattttaactgaatgactagagtgattatcttttttcccccgaagttagtcgtaaatcttttgggttggaaagaatgctctacatgaggatgaatagaacacagagaggcgaacagatgatatccctgtttgtgaccatgaattcctgaaagtggaccaaggaacactttttgaactcattctggctgcaaactacttatacattagaggttggcttgatgttacatgcaagactggtgccaatatgatcn

SEQ ID NO: 351 - DNA, 542 bp, Homo sapiens
agaagaaaaaccttgatcgcccctaggtagtcccgcctgcaggaattcggcacgaggtcacgtggtgcagagcacgcagagtccttctgtcggttggtcctggagcggcgcagccggagtggggccgtgaggagaataaaggcagccccgttgatgactgaaaatgacaaagcatccacctaacagacgaggaatcagctttgaagtgggagcccagttggaagcccgggaccgtttaaaaaactggtatccagctcacatagaagacattgactacgaggaaggaaaagtactcatccatttcaagcgttggaaccatcgttatgatgagtggttctgctgggacagtccttatttacgccctttagagaaaatacagctgaggaaagagggcttgcatgaagaggatggatcttctgtgagtaacaaatctgggaagttctgtagtatgcaaggtcagccattgggctgcttgtgtttcaatctttgatgttagtagcagctggagaccagttcttatttaggcctatagttgtaaccct

SEQ ID NO: 352 - DNA, 403 bp, Homo sapiens
  misc_feature (1)...(403): n = a,t,c or g
agctttctttccttctctaatatgtctattttgaaagttattccttggtttccctatcttacatggctcctcttctcccccttgattgaaggtccctagtttaactcataaagtatcagcattagtaagcagtaattctttctgagtgatgtacttagtgatctttcatatgaatatgaaggtggcctggcgcagaggctcactcctccactcattccagctgggattttacaaatcccagcactttgggaggccgaggtgggcggatcgcctgaggttgggagttcgagaccagcctggccaacatggggaaaccccatctctactgatncaaaaaaagattaaaaagggggggcggccctttaaaagaaaccaagtttactaacccgggcatggcaatgtt

SEQ ID NO: 353 - DNA, 405 bp, Homo sapiens
gatcttgctctgtcgcccaggctacagtgcagtggtgcaatcacggcccactgcagcctcgacctccggagctcaattgatcctcccacctcagcctcctgagtagctgcatctacagatgtgagccaccaaaaaaaaaaaaaaaattttttttgacacaggatttacccttgtggcccaggctgaagggctttgggcctcactgaaagtttttcttgagctaaaaccaccctttcactttaccctcccagggaggggggattaaagcctcactccacccccccgggccttgtttttcttttggaaacatcgttctacaaggcggggggaacatcgttttttaaataagaagtttttttggaaagttaataaacccagttggggcctgggaggaaaacacccaga

SEQ ID NO: 354 - DNA, 877 bp, Homo sapiens
gcgatctgcttacgccaatcttggtacgaggggcataaatattctaacggttaattttagacatctacttgactggattaagagacacacatagctggtcaaacatgatttcagccatgaatcaggcataaatattctgatggttaattgtagacatctacttgactggattgagagacacacatagctggtcaaacacgatttcagccatgaatcaggcataaatattctgatggttaattgtagacgtctacttgactggattgagagacacacatagctggtcaaacacgatttcagccatgaatcaggcataaatattctgatggttaatcgtagacatctacttgactggattgagagacacacatagctggtcaaacacgatttcagccatgaatcaggcataaatattctgatggttaatcgtagacgtctacttgactggattgagagacacacacagctggtcaaacacggatttctgggcatatctatgagggcgtttctggaagacactgagataaccatgacccaatgtggatgggcactgatatggtttggctgtgtccccacccagatcctcatctttgaattgtagtttcctgtaaatacctacatgtcgttgggagggaccccaatgggagggtgacctgaatcgtggtggtggttaccgccatgctgttctcattgacaagttgagttgaggttctcaatgatctgatgggtttttataagggggcttttcccctttgggtcagcacttcttgttgctgccatgtgaagagggattagctttgcttccccttctgccatgattgtgaggcccttgcagccatgtggaactgtcagcccattaaacccctttgttctttat

SEQ ID NO: 355 - DNA, 803 bp, Homo sapiens
cgcggccgcgtgaggacgaggctatttgaaaacacgctccgggagctagagcctgaggtcggcggcgcacgctgttgccccgtgggcttctgctccctcgcttgtcttctcgggcttctcgccccggccgcggccgggtcctcagtagtcgagaatgactaaaaaaagaaaacgccaacatgattttcaaaaagtaaaattgaaagttggtaaaaagaagcccaagttacaaaatgctactcctacaaactttaaaacaaagactatacatctgcctgagcaactcaaagaggatggaacacttccaacaaacaatagaaaacttaacataaaggatttgctgtcacagatgcatcactacaatgctggggttaaacaaagggctcttcttggacttaaagaccttttgtctcaatacccatttataattgatgcacaccttttaaacatattaagtgaagtgactgctgtgtttacagataaagatgctaatgtacgattagcagcagttcaacttcttcaattcctggcccccaaaatacgagctgaacaaatttctccattttttcctttggtaagtgcccatctctctagtgccatgactcacattactgaaggaattcaggaggactctttaaaagttttggacattctgctggaacagtacccagctctaattactggccgtagcagcatattgcttaagaattttgtagaacttatttctcatcagcagctgtccaaaggactggataaatagagacagatcccagtcctggatactttctgtaaatcctaatcgg

SEQ ID NO: 356 - DNA, 369 bp, Homo sapiens
attgtccggagttcggagagtttgcttgtccctttggctggagggcctctctgggctggggatcacctcaggcgctgttcttcattgagcgagcccttatggaccccgaggactaatggttaccgggagagatggctgtggagccgccggcggaccgccttcaagaaccactgaccttccgggatggggctgaggactttacccaggaggaatgggggcagctggaccctacccagaggatcctctaccgtgacgtgatgctggagacctttgatcacctgctctccataggtcctgagcttacgaagcctgaagacatctcccagctggagcaaggcaccgatctatgggtggctgagacactaacca

SEQ ID NO: 357 - DNA, 2761 bp, Homo sapiens
ttggacacaaaatatgttatttattgtcaatttctgcaaagacacatttaagcaacaaaatatacatttgtcaaccttttagaatttgttttgtacattaacaaatacaatgtgctaccatagcaataaattaaatgtacattatttacattacataggcagttggggatctacgaatcacctcctcactaagaggaaagaaagcaaagtcgtcgtcacatggagcatcacttccaagccacagttcttaggttcgaccacacaggggaatctgcacattcacacgccagcagtccccgagctggagtgtccaaggggaaacacccaaaacaggagagagctgcacgcatgctaaggagcaggaagccgggggggggagggtagttcacacttccaagcagaaatgtcacaaaatcaaagacgatggcaattaaattccagtcttccagccaaatgtccccctccccagggctggtaaggcacaggacagagccgctgccccacagcctctcactcggcagggctctgctgcccttggccctagtggggcttgtcttcttcctcccaaaggggcacacggtccagctgaagggagggagacatgggattggggtgtacaaggggctggcggtaaaacagagtttggtaaaagaataccccagccagccccaccaggctgcaggatcaggcttggcaaactttactggcctccccttgcctcgatacagggtagctagaggctgggggaggagccgaggggtcctgagcatggctgactggcctggtccctgctggcctcctgtacccatgagatctactcgaacccccaactgcttaaaacagatctgtctctactgacttagaaaccaatgagaaaggtagtgtttgagttggcacctggcagggtcagggaggaaagcgaaacaggctcttgtcctgccttgtcacgggagcctgagtttctattaaccaccttcgtttaagaatcagggagaaatgaagagtttttctttgaccacttttcctcttaatttaggaaaagggaagctgagggtgggtgaacagcatctttttccctggcctctgcccccattacacagcccccatcaggagctgaagaaccgatcccactgaggaatagttcactgaatccctttccctcctcgttttcttggttcaagctgcatccaaagcccaagggtcctcactgaaaaatcctagagactatcccccctgatgaaaaagagcagaaactgcagcctcaccagcatccttgactgctcacctccatgccagtgccaaagcagcagctaactggcttccccaaaacccagggccccaggaaacgcagccacttattcaaccaaccatgtaggcgctgcagaggaagggaccctgggttgagggttctaatcccagctttgccaacagccagctgtgtgacctcaagcaagttattcccctcacctgggctaagatttctcatctggacgatgacatggttggatgagatgctaaaaagagccagcaggcttgtgttgaaatgatgctgacaaagctgaaccactgaatctttttcaagaaacgtcattttacatgactggcatagacagacactctcattaagaccttccatcgcgagcttttctgcacctgtttttaagcgtcaactgagctggaggcatatgggtgaccctacagtgcctgaaaagtagtttcttcagtgagtcaggcagttcccagagccagagatgtgtcccggaaaacatcccctcgtggagatcacagtggaaatgcctcaaacaccagcgtgggcaccatctagatgagcctagtcacgagggccaatgaggtttgggcaaatctttgagccccaagactgggcgcagcataaaaggaaagacattttagatcagagcagatgtagggacagcgtgggggaaacagccctccaggaacccgagctgcccgccccgtggtctaggggagggaggggaggctgggccatccttgttctcctcctccctctcagcactgcccgggtgggctggaagtgcacactctggaagccacaggatggagctcccagagatagtgaggcatgaccagagggaagaggcatttggggtcctgttcagatcattccaacagcaaaccgggcatggagaccccatctcaggtctgtgcttctctgggggccacccagccatcctgcccaccagctcagaggcagggacaaagccctcccaagaggcagcaggcagcaagggtcagccagcgcagtggggacaggcaggtatgggattcccaaatgggacagcatgctgacaacctggaaaccccaaaggaccccagatggcaatgtgacacggcccatccaccaagcacctgtaatgccggcttcccacagaggcaagccagatcctgcaactgttcttaaagaaatgcagtttgaccttgccagtgcctccagaagcccagccaacaaaacgcgtccagaacgtacgggcctctttccagccgtgggggctgctacggtgactcttcataaaagctaaacagatattttgttgaccttctaacaagaataaattttactagactagtactttagagaaagtactagcgaagggagagctcctctccagcttgcaaacaggactcaatcattcccacacacgtggcggggaagaaagatcacaatgttgcttgaatggcaaaagctatagggagaatttcacaatgtcagttaaaaaaaaaa

SEQ ID NO: 358 - DNA, 1646 bp, Homo sapiens
ggacgcgtgggcggcctctagtgcactttcggctccttccccttcccgggcctttcagcttggtctttccgggcctcgcttcccccagcccctgcgcccggcccgaacgagaggttccggagccccggcgcgggcgggttctggggtgtagacgctgctggccagccctccccagccgaggttctcggcaccgccttgagagcttcagctgccccagggtgtgcagattagaatcccaagaaaatcaaatggcatccggggatttctgctcacctggagaagggatggaaatacttcaacaagtgtgcagcaaacaacttcctccttgtaacctgagtaaagaggacctgttacagaacccatacttcagcaagcttctcctgaatctctcacagcatgtggatgagagtggcttaagcctcaccctagcaaaggagcaggctcaggcatggaaggaagttcgactgcataagacaacatggttgaggtctgagattttacacagagtcattcaagagttgcttgtggactactatgtgaagatacaagacacaaatgtaacttctgaggacaaaaagtttcatgagacccttgaacagcggctgcttgtaactgaactgatgcggctcttaggtcctagccaggagagggagatacctccactgctggggctggagaaagcggaccttctggaactcatgccactctcagaggattttgtgtggatgagggctcggctacagcaagaagtagaggagcagctcaaaaagaaatgtttcactctgctctgctactatgatcccaattcagatgctgacagtgaaaccgtgaaggcagcaaaggtgtggaaactcgcagaggtcctggtgggtgagcagcagcagtgccaggatgccaagagccagcagaaggagcagatgttgctgctggagaagaagagtgctgcttactcccaggtgcttctccgctgcctcactttgctgcagaggcttcttcaagaacaccggctgaagactcaatccgagctagaccgcatcaatgcccagtacctggaagtcaagtgcggtgctatgatccttaagctgaggatggaggagctaaagattttgtccgacacttacactgttgagaaagtggaagttcatcgtctgattagggaccgtttggagggagccattcacctacaggagcaggacatggagaactcaagacaggtcctgaactcctatgaggtccttggggaggagtttgacaggctggtgaaagagtacaccgtactcaagcaggcaacagagaacaagcggtgggccctccaggagttcagcaaggtctaccgttgagctctggcagggccaggagacatggcttctgcatagctgctgcctcctaatcttcctgctagtgggaccaccttcacctggggctgccttcagtacaagggagtgtggaaatgcttacgcttgaaacactgcagtcatttaggcactctcctggtttctctttattttttatgactgggcctcttctggaaaatctagcaaggagatttatataatttttatgcatagctgtgtgtcagtgtcagccctgtattgtatttgattatctcctgaataaagttatgatattatatcttaaaaaaaaaa

SEQ ID NO: 359 - DNA, 407 bp, Homo sapiens
aaaagacctagtgtgccaaaaatgaatgtcaaggtgggcaggtggagtcaggtagtttttaggccatttatttgtaaacagttattttatctatgcgtctatctgtctgtctgtctgtctatctatctatctgtctatctatctatctatctatctatctatctatctatctatctatctatctatccctccatccatccatccattcaactggcatctatttaatctatttttctttggggttaaattatgaaagagcacggagagaatagatttattaactataaagacagggaataattgataacataacatccctgagaaaattgaagaggatgatatacaaaaacaaaatcatttatttttggatggagggtataggtagaggggtctgtcattgtattggg

SEQ ID NO: 360 - DNA, 1236 bp, Homo sapiens
cgaaaaatggcggggtctcctgagttggtggtccttgaccctccatgggacaaggagctcgcggctggcacagagagccaggccttggtctccgccactccccgagaagactttcgggtgcgctgcacctcgaagcgggctgtgaccgaaatgctacaactgtgcggccgcttcgtgcaaaagctcggggacgctctgccggaggagattcgggagcccgctctgcgagatgcgcagtggacttttgaatcagctgtgcaagagaatatcagcattaatgggcaagcatggcaggaagcttcagataattgttttatggattctgacatcaaagtacttgaagatcagtttgatgaaatcatagtagatatagccacaaaacgtaagcagtatcccagaaagatcctggaatgtgtcatcaaaaccataaaagcaaaacaagaaattctgaagcagtaccaccctgttgtacatccactggacctaaaatatgaccctgatccagcccctcatatggaaaatttgaaatgcagaggggaaacagtagcaaaggagatcagtgaagccatgaagtccttgcctgcattaattgaacaaggagagggattttcccaagttctcaggatgcagcctgttatccacctccagaggattcaccaagaagtcttttccagttgtcataggaaaccagatgctaaacctgagaactttataacacagatagaaaccacaccaacagagactgcttccaggaaaacctctgacgtggtactgaaaagaaagcaaactaaagactgcccccagagaaaatggtatccattgcggccaaagaaaattaatcttgatacatgagctctttctgtttattttgggagttgaaaataggcaccatcaacatttagattacagcctaattaatacctagataagacttcatttgaaataagaaataactcttttactagtgattcatttatacagatataatatctctgtgcggggatatgatataatattgtatttccttactgttttatctattgtaaataaaaagcattttaaaaagtattgacacaaagcccatcagtgggcattaaaaatattaaaagtgcagactttttactggtcctttaagtgccatcaactctcagctcccttgtagcttttgtggggatttaacaagtaacaaattctgttgtgtttccaatggtatacatctttctaggaaaaaaaaaa

SEQ ID NO: 361 - DNA, 2353 bp, Homo sapiens
gctgacaaaggagcggaggagcagtcgcagctgctttccgaggaagccggtgttgccgagattgccaaaatgctttggagtttttaactgaatctaagaaaagtccaaaatagatttgagactgtaaaaacagaaactgcagcaagggggattcagtgccaatgcatcaacaaaaaagacaaccagagttagtggaaggaaatcttcctgttttcgtgttccccacggagctcatattttatgcagatgatcagtcaacacataagcaagtgttgacactgtacaatccctatgagtttgccttaaagttcaaagttttgtgtactactccaaataagtatgttgtcgttgatgctgcaggtgcagtaaagcctcagtgttgtgtggatattgtgattcgtcatcgagatgttcgatcctgtcactatggtgtaatagacaaattccgtctccaagtttccgagcaaagccaaaggaaggctttgggaagaaaagaggttgttgctactcttctcccatcagcaaaagaacaacaaaaggaagaagaggaaaaaagattaaaggaacatttaactgaaagtttattttttgagcagtcgtttcaaccagaaaacagagctgtatcctcaggacctagtttactaactgtcttcctgggagtggtgtgcattgcagccctgatgctgcctacactgggggatgtggaatcgctggtgcctctctacctccacttaagtgtgaatcaaaaattagtggctgcttatatcttaggtcttatcacaatggccatacttagaacatgagcaaggatttcaattgacttctgaagtaaatctgtcttgaaaatatgaatgtggactgccttttatctctatttcactccattaacatgcaacaaactattgaatgatttcaaataattgcaaatgtataatatatattttaaattataatttaatttgaaggactgcagaacattattttacagacagcaaggatgcttctgagtgacacctaggaaattatttgaagaaattctttttatatctacacctgttgtgtaagaaactttaaaacattggttattttctcacctttttttctaattcactttgattgctaggggtcatgtatgcttcgaagttacaggactaaaagagcaaactgaccggcctaaaactaaaatgacatttattccctagctacaaacatcagcgttattatgttaattataccttgccctctatcattataaatggttgccatggtgtttctaaaaataagtgttttaccattaatgtgtagagggcaaacaaagcataaagtactaagggatcatgcttatcctagggtctcacagaagagaggacatatttaattaatcttgtgaattacagaacaggttgtggtccagacaccaagaatcataggggtttttttttaaaaaacctaatagaagtagggtgacctctctctttggtctaagagttctaaaggaaggtaggcatctgtttaattagttggttcaccctggctttacctctggttaatgctttgtgttaataggaaggaaaaatcactttatcttttcttccaagcccctccctgcctgacttacccagactgggattaccagataccaggtgatttatgtggagatgatttttcacctttaaactctaagccaagtgtaagaaactcttgatagctatgtctattttatatcagtcactgagactttttttttaagtttttatttattattaagacaactttgccaaaaaagtcccctaagcacaactatttacatttctttatagcctcttctgatctctaacacatatgcagttttaactgttattttcatagtaactgatcttttgtctaaggatttttacctgaaagcacaatgtattgagtctcttgaaaatcatctttcagatctttttacagaatgaacttatgcactgctactgtagtattctcaaggaatatatgtaaacacaaatgtatgcctgaggttggtttttgcagaaaaccagtctctggcttcttaaaaacttctatgtctagtcttccataggaaatccctcactgtttaaccatgtgaggagcctaagtcccctaagtcattaaacggaatcatgtctgtacattgtgtaatgaatgaaaagcacataaatgtaatctactttgaactttgtaaaaatgatgtgtggaggctattcttgtttctccatctcaagtcctgtgtgtgcacgtgtgtgcaagtgcacatgtgtgtgtgtaataacacattgtaaagaacagaaattactttaaaaaataaacagaaatggagacctgaaaaaaa

SEQ ID NO: 362 - DNA, 2304 bp, Homo sapiens
ctgccgaggatccgagggtcaggctgcagaagcccagaatcccaccccagtccccaagtacagaggtgaggggaagcgaggcgaacgaggggacgtcccccgaccccctagccgcagctcggccggggcgtccgtgacgtcagcacgaccgtttgtgggaggcggaggcccctgctgtcggggttcggaatgagagcggctccgggtcgcggggttcactggcctcctcttgagcttcccaacccaccttgggctccgtgttgggcatggctaaggcggagatgggcggaacttgtgggaagttcgacagctcctccgctgtgaaacttggcgtctaagtcatcccgtggtttctatggaggtgcggccgaagggaggctctgtcgtcgcctaagcaatcgccccacctgcgctgaggtcgctgtcaagatggagtttccaacccagtaaatccaagggccagaccgtgacctcataaagcatgatctccttctgtccagactgtggcaaaagtatccaagcggcattcaaattctgcccctactgtggaaattctttgcctgtagaggagcatgtagggtcccagacctttgtcaatccacatgtgtcatccttccaaggctcaaagagagggctgaactccagttttgaaacctctcctaagaaagtgaaatggtccagcaccgtcacctctccccgattatccctcttctcagatggtgacagttctgagtctgaagatactctgagttcctctgagagatccaaaggctccgggagcagacccccaacccccaaaagcagccctcagaagaccaggaagagccctcaggtgaccaggggtagccctcagaagaccagctgtagccctcagaagaccaggcagagccctcagacgctgaagcggagccgagtgaccacctcacttgaagctttgcccacagggacagtgctgacagacaagagtgggcgacagtggaagctgaagtccttccagaccagggacaaccagggcattctctatgaagctgcacccacctccaccctcacctgtgactcaggaccacagaagcaaaagttctcactcaaactggatgccaaggatgggcgcttgttcaatgagcagaacttcttccagcgggccgccaagcctctgcaagtcaacaagtggaagaagctgtactcgaccccactgctggccatccctacctgcatgggtttcggtgttcaccaggacaaatacaggttcttggtgttacccagcctggggaggagccttcagtcggccctggatgtcagcccaaagcatgtgctgtcagagaggtctgtgctgcaggtggcctgccggctgctggatgccctggagttcctccatgagaatgagtatgttcatggaaatgtgacagctgaaaatatctttgtggatccagaggaccagagtcaggtgactttggcaggctatggcttcgccttccgctattgcccaagtggcaaacacgtggcctacgtggaaggcagcaggagccctcacgagggggaccttgagttcattagcatggacctgcacaagggatgcgggccctcccgccgcagcgacctccagagcctgggctactgcatgctgaagtggctctacgggtttctgccatggacaaattgccttcccaacactgaggacatcatgaagcaaaaacagaagtttgttgataagccggggcccttcgtgggaccctgcggtcactggatcaggccctcagagaccctgcagaagtacctgaaggtggtgatggccctcacgtatgaggagaagccgccctacgccatgctgaggaacaacctagaagctttgctgcaggatctgcgtgtgtctccatatgaccccattggcctcccgatggtgccctaggtggaatccaggtgggaagagcttgtgaggcttaagcctctcgccccttgccctcacccgagccctgccccaggctccaggagacacttcccagaggctgttccacgttcataccagggcccagcttcccagggagacactgggtttttccgcacggtccttgaacttcccagcctcaaggaatggcaagtagcagaaacccggctcaacttggctttaaaaaaagtggggattgattggctgttgtagctagaaaattacaagggggagcttcaggcacaacgggattcagggcctcaaaaatagcatcaagacgttggttgtctctcgccatcttctgtcccttcttgcatccatgcctccctctgtccttccacccggccacctgtagtctctac

SEQ ID NO: 363 - DNA, 3827 bp, Homo sapiens
ttttttttttttaggattattctatttttatataagtcaaaagtgagcaaaaatgtaaacacaatattgttatacacataacttggtaaaataattcattaaaaggacagagggagaattaccatacgtcaggatagttagctctgggggaaacagtgagtgtcaagaggggacacacagagattttggagtgctggcaagacctcctctgcatctagtttgtgattacacagctgttgctttacccattaagctctgttttaagtacttatttgtaagttatatttcacaaaatttaaaagaacaagggagaacctgtgtactaccaaatattaacaccaattaaagcgataattattgacagtgtagaaaaaacccagaaggcccagaaattggcctaagacacaaaagacacataagaatttaatattctataaaaatagcattactaatcagaggggaaatggtggtttcacatactgaaccaattggtaaattcttcgaaataaaatcaaatccctaccttatataatataaccaaatacatttgagatggattaaaaatttccttttcaccccaaacttgtactgatttagttaatgtatataaacaaaatttaaattccttttaaagataggtgtaaaagtgaaataagaaaatactagaagaaaataaggacatttatccattcttggattacaaaaatactttcaagcacatacacaaaggtagactcctaaagaaaacaacttctatactgaaataccacaaactatgttaaatgacaaataaggctaaaaaaagttacaatatatgacaaaggacggacattcttaagaacttatatgccaaaaaaagagcaaattctccaagcaagcaacagaaaaaatatgaatgagcaattctcaaaagaatgaatatagcatggccaatgaatatgaaaaaaaacacaaccttcactaagtaagaaaaacaaatacaaattttaaatgtagcccttttctgtaattattcaatttgcaaagattttaagtagtaattttcaattctgagcattggatatattgctaatgggaatgtaaatgaacatgatctctgcagtgagtaatatatataaaaattctcaaaaacactttcacctaacaatttcatttttagagcggtatcttctggaaataagtcattttctatggatgtgattaagatgttaatcatatcactatttacagattacattataatacataatcaaattgctgaataggaaataaatcttaaagttatggtatacccatgaaataaaatatcctacagctgtctaaaaagcaaaatatttaatatgggaacatattgacaatatatagagcagactacaaagcaatgtacattatgatttcatttttgagaatataaatgcataactatgcatagaaaaataagcaaaaacacaacatcaaaatgttaacagagtttatctccctagatggcaggattacagggaactgtgtgtccaggcacatgaactcttccatatcatccagcttccagaaataacatcaaatttttacgctgtgaaatcatttactattcgttttaaggaactaaaactaatgaggaatcttagggtcagtatacttttcacatttgcttgagggggggtaaggaatgaaaggcaataattacacctggaagcaaatgtgaacagtctttttcgaaaggaaaaagttgtatttaattaagtcccggtaaaacatcaccttagcatttgaagttgttctaattaatattttattcttcaacacttttaaagactccaatatattagacaaagaattttttgataatgtaagttaatttctctggagacaaccatataatcctctaaaatgacatgaacgtttatatatgggactgaagcttctgcagtctatatatacctatttggggggaaaaaagtaaagtactgacaattcaattttaacaaaaaaaaaatgctttccttatcaaacattaatgttgtgtacatgaacctatcatctgtgacagcaaggaactcaagccaggtgatgcacaagccttcacccagctcagttagcttgggcttctcctgtaccagatttgcctgaagtaacatgaggttatttaaaaagacctccacctagattgcagtgagccgagatccctgccactgcactccagcctgggcgacagagcaagactccatctcaaaaaaaaacacaaaaccaaacaaacaaaccaacaaaaaaaacctccactttccagcatctactcaaaagggaagtccttccctaatccagaagagagataacgttccttccctaagggaagacagaaaaaggagaagagcatttgttaagcattctcccatacatgtcttccctaggtatttcacatccaatgtctcaataaccccatgcaaacatgcatacaattctttagactgctcccttcattacccaaaaaagaagggaactatgtcttcctaattgattttaggtgcctggaacaactaagtatttcactgaaagacatgtaataaatgctatttgataggtaaaaaaaaggaaaaaagcaaagttacctcttttcatttggcttaaagaaaaaaaaagtatgttctactatatactaaaatatcagaccaatacacaatatattgcaaaattttaataccatgtggttaaacacaatattcaaatattaaacttttcaagcacatgaaagtcaccttctgaaagacaaactgggctttttttataactacctttgtgtaactttataaaattacttccctcaacaatatctgacactgatcttgatactagttagaaagtctgatgtaagatgatgacatctcaacgtcagtgatttaggagattatcttcagaattcatcagaggaccaatcgtcatcttcatcccttacttctcggtatctccctgaagactccccttctggattataactccgcattttaatattcagtctttcagctaatttttgcgctgcgagctttgcttgcatctcctcataattctgtttctgctgtttctgaagtgccaaggattcttctatggagagcagctgcgtgggcatatggtgaagtggtagaagccgagctgctgtgatgtcatcaagatgctgcttatccctgcgccgccgctcttctgaggaaataggagacccactcttctggcaatgactagatgaatcattttgtcgaaaaggtaacacattggttttaaatttacgcagctggggcactgggtttttggctcgcatttctagcacttccatgtaatgaggtttcttctcagtcccactggaaaggcctgtcaagttcttagtacttgcgttttcttctgactgttgttcaccttggtccgcaatggtgatcctctgtaacctgtcaataaacaggttgtcaaagctgctggaagtatcttccgcttgacttgaaacacgatgccgcgggtgatgctcactagcttcagatgaaggtggtaccctgtctctattgctggaagctgggcccttattcactgtgtactcaacctctgaagtctcttcatcaccttcaagagtaggacgtccaagtccctggttttgtgaggtttgagatgacttgatgttatctacagaggaacatccaggaactagtgatgaagtatcaagtatcgggtcagaattctgggccttatctgtacccacatcaacttctgcaattgctttttgccttagcttacagtctaaactaacagggttaaacagttcactttttcttctaacttcttcacattctgcc

SEQ ID NO: 364 - DNA, 588 bp, Homo sapiens
ttttttttttttggggctgggtaccaataaaactttatttatagacactggaattcgaatctcatatcattttcatgagtcacagaatcttcttcttttgctatttaaaagcaaaaataaaaattcttggctgggcacggtggcttgtgcctgtaatccctgcactttgggaggctgaagtgggaagatcatttgaggccaggagttcaagaacagcctgggccacctatgggggatcccttttctacaaaaaataaaaaatgaaataaaataaaattcttagttcatggtcaaaaacaggatttgctttgcggaacaccatttgcagtcccctatgctaacctatctaggtgcttaaaacagtacctaacaccctgttcttgggttggctttaaacaccaaccaaggatttaatacctgttagccatttcaggtggaaagatgtgaatgtggtatgaagtgggtcatctgtggcagttggcttgttggtgagggacaggccattggtaatggaagggtcagctctgtcttggaacagctgcccagagcatggcccgccatgctccccctcaacacccaaagtgacac

SEQ ID NO: 365 - DNA, 1209 bp, Homo sapiens
ctttattgaatattgacacggaagaggctccacacacaaaaactctttataagttctcatatattttgatgatcatgttcgtggtagatatgaatattgtgttaaatgtaagaaaagtggcttttgttctggaatattactttggtcagttaggaatcagatctgccacacataaagggcaggttcataaaggctgtacaattccactgtcctacatcaggcaaggagggtaaaataactcttcaggcctttattcacccaaattgaatgtgtttcataagaaattctactcagagagaaagtctgcatactgagaaaattatatagcaatcatgttttcctaacccaaaaataaaacaacaagatggaaaagttcacagcactttatgccccacacgctcccctacgaccatctggagacaagactgaactgggaggagggactgtggactctctgagggctcaatatcaagagtctgtgcaataacttcgagatccttctttgattagctgtgttttctcatttgcatttgtaggctggagaaaaactggaaagtccacatctttttccatgtcagacttgatctgctcctccagatcctctggggacacatagaagtcctcttctggcactgatgactcgggccggcagtgtccacagcagcagttgcagcagcagcacaggcagcagcaaaagtagcagcccgtcaagaggccaacgatgacaaacagggcctttgcacaccagctcgacagcatgaagtaggtgttaacgttttcgtctccaaactgctcggccacgtagagtcccagcgatccgtacttgtcgtatatgcttctctttgaaatgtcggtaagtattgcgtgggcgtctgtgatttctttaaacttctcagtagcagctggatcatctggattcttgtctggatggtgtttcagggccaattttctgtaggttttcttaatttcttcatttgatgctcccttatgcagaccaagaatttcgtatagagcttctcctgttgttgacagagtccgctgtctttggttaggtatgttacatgccattttctaaggctgcaaaactgttccaccgtttcaaagcaaacagctgctcctttccatccttcccccccatgcagggttaagcaggtcaatagagtcaggttacttttcatttgttactttgccagccaattggttatccct

SEQ ID NO: 366 - DNA, 2644 bp, Homo sapiens
aggcttgcggccgcgggagctgaccctgcggggtcccggggggggagggggagccgcgaagcccccactgaggccgcgcggtgccgggcctcccctcccccccgggcgggcgccatgcgggggagcccgggcgacgcggagcggcggcagcgctggggtcgcctgttcgaggagctggacagtaacaaggatggccgcgtggacgtgcacgagttgcgccaggggctggccaggctgggcgggggcaacccagaccccggcgcccaacagggtatctcctctgagggtgatgctgacccagatggcgggctcgacctggaggaattttcccgctatctgcaggagcgggaacagcgtctgctgctcatgtttcacagtcttgaccggaaccaggatggtcacattgatgtctctgagatccaacagagtttccgagctctgggcatttccatctcgctggagcaggctgagaaaattttgcacagcatggaccgagacggcacaatgaccattgactggcaagaatggcgcgaccacttcctgttgcattcgctggaaaatgtggaggacgtgctgtatttctggaagcattccacggtcctggacattggcgagtgcctgacagtgccggacgagttctcaaagcaagagaagctgacgggcatgtggtggaaacagctggtggccggcgcagtggcaggtgccgtgtcacggacaggcacggcccctctggaccgcctcaaggtcttcatgcaggtccatgcctcaaagaccaaccggctgaacatccttggggggcttcgaagcatggtccttgagggaggcatccgctccctgtggcgcggcaatggtattaatgtactcaagattgcccccgagtcagctatcaagttcatggcctatgaacagatcaagagggccatcctggggcagcaggagacactgcatgtgcaggagcgcttcgtggctggctccctggctggtgccacagcccaaaccatcatttaccctatggaggtgctgaagacgcggctgaccttgcgccggacgggccagtataaggggctgctggactgcgccaggcgtatcctggagagggaggggccccgtgccttctaccgcggctacctccccaacgtgctgggcatcatcccctatgcgggcatcgacctggccgtctacgagactctgaagaactggtggcttcagcagtacagccacgactcggcagacccaggcatcctcgtgctcctggcctgcggtaccatatccagcacctgcggccagatagccagttacccgctggccctggtccggacccgcatgcaggcacaagcctccatcgagggtggcccccagctgtccatgctgggtctgctacgtcacatcctgtcccaggagggcatgcggggcctctaccgggggatcgcccccaacttcatgaaggttattccagctgtgagcatctcctatgtggtctacgagaacatgaagcaggccttgggggtcacgtccagatccttctgctgactgccagatccctgcatttcaagcactacgccttccacccccaggcactggatcccagattcccaagccttcacccaccagattctggctcctaaaacaagtgcgggggccccagtggcacagcaagtggatcctggcaactgcagctgctggattccagattctgggtccccaatccctctgcccagtccctcaatgttgaaacctcatctcttgaaggcagatcctgatattccaaggcactgaatcccaagccctgaatccccggtttctgatctgaatcttccaggcgccgggtcccaaatgttcaggccccaagtctagatcctggcagcccagtcacagagtatcccacacacactggtgcccagagccggcttctcatgacatgaaattgcatggtcgagggagtctgtggggaaggaagcccaggtcctggctgcaacctgcacggatgctggattccccctcaccccacctctgcatggccaccccctcccagccctgtggggaaactgttccctggaaccactccactccctgcatccccacacttcacagcatcttccatccccctcccaccttctaggcgaatagtccccagagctgtgttcctccaaggggtccgaggaatcactcactcctggaggctggcaaggagacagtctgaggccagggacacatgaagggatgtccccaccccagcactatcagggcctccccaggcttccagagttgaaagccaggagaaaatcggcaaagaccacccttccctaaacccaagcaccccaatgatgcaaaaaacaaaaacaaaaaaaaacccacccaaatcccccaaattcattccagatctatttttctaccagagagaggagcaaagtcctcctcccctgcgcccttacattctgcacttcatagttggattctgagcttaggatcatctggagaccccatggagggacttggaaaggggaactgggatttggggaggggctggaggacttccgcacgcttccacctccttcgacctccactgcgccccacctccctgcctgtgtgtgttatttcaaaggaaaagaacaaaaggaataaattttctaagctcttaaaaaaa

SEQ ID NO: 367 - DNA, 1852 bp, Homo sapiens
tttttttttatgttttttttaactgtttatactggtttaatccatgtcaaatgtagtttacaaagggaaaggacaagtacctttgtatagaatatacagacacagcatcacaccatagggcccacgggagggtcggggagacgacactttttccctgggaaaggcagctctaatcccaggaatggttctcagcagaggctgggtggccaggagcactgtcctctagccccctaactcagcctctgcttcagctcggttcccatttcctgcctctaccccccaactccttataaagagccccatgagctaagactaaggagaggatcatgtcccttggggcgtgtgccccatgtctgggagaagaaatatacaccactgaacaccgagcacatgggagagggaagggacaccacaggagagagagaggcaggtaccccaagaggtggatgggccgagctcccagccaaccctgaaggaggcgctgcttccaggggttcttaaaaaagaagaaaatcatacaaccaaagggggaggggacaggtagagggcgaggagttgtcccatttatacacaacattgtaaacatacacggtctatattacatgtgcttcagtctggtgtttgcatgtctgtctgtccgtctgtcagtatgggggctggatcttaggagccgtgccccactactcccccaacccccacctccctgccccaccctgggaacagagctggaacaggtatggcccccaaaccataggtgggagccagcaggtagtgcctgggccacagcctctactctggctccagagtcctgcgtgtgtaaatgtgtgtgtgtgtacgcatgtttgagtatgtgcatgtatgtacatggggaacctgtgtgcaagtatgtacaaagggagacggtcactgtcacagaggctgggggcaggtggggctgctggaggcgaggcctgcctggggcagatagctcacaagtagatcctccgcaggtctccgggcgctgtgatcgtgttgcactgagggcagagcttcttggcacccagggtccgcagccagcactcctcgcagtgcacgtgccaacactggatggacgttaggggcatcgagtacgagtccatgcagatgaggcatttgtaacggtccccacgagatagctgccgttcaagttctctgacccgagccttcagagcctcaaacgtggtcacagctgaatcttcggtgattttctcgatgtcgctgttcttgcaggtcttctgcatggcctcctgcttgctgctttcaccattgctggtggatggcatctcatcactggcccatttagagaactcaggtgtgatgcgcgtgctgggagggccgccatttaggactgcgccccgaagtgcctctctctccttggcttcaccaggctcctcgcctgtgcaggggatgacatcagcctctgtgtattgtggcttcccatactccagagtgtcatccccatccacatccaagtcagcatcactgtccgggttctctttgccgctgcacatgatgaagccagagcctcggaagccaccttccaggagagtggtggcccgtatccgcttctgtccacaccactcatactcctcaaagcggttgttgttctcatgctcgatgtccacagcatcatcctcagccatgcaggagccttccctctgcccttcatcttgcttcctccgtttcattttcccaatccgagcattcagtcgggtctgccggttggctcgtactcgcagaaaggtctacttcctccctcccgccggcccctctgctcctccggccgctccgggctctcggcatagccgccgggcgctgctctaacgggacgaaa

SEQ ID NO: 368 - DNA, 2338 bp, Homo sapiens
tttcgtgttgcagcccaggcggaggcgcgggatctcgagctgggatcgccctcttgggcttcggtgcgatcggcggcgggaggttccctgggaaccaggtggtcgaagggctgagctgtgtggccagacaagaggtccctgccctcccccagtgagccctgctgttcccgtgggagccatgaagctgaacgagaggagtgtagcccactatgcactcagcgactccccagcggaccacatgggcttcctgcgcacctgggggggcccagggaccccaccgacccccagtggcactggccgaagatgctggtttgtcctcaagggcaacctgctattctcctttgagagtcgcgagggccgggccccactgagcctggtggtgctggaaggctgcacagtggaactggccgaggctcccgtgcccgaggagtttgcctttgccatctgctttgatgcccctggagtgcgcccacacctgctggccgcagaagggccggcggcccaggaggcctgggtgaaggtgctgtcccgggcaagctttggctacatgcgcctggtggtacgcgagttggagagccagttgcaggacgcacgccagagcctggctttgcaacgccgctcatcctggaagtctgttgccagccgctgtaagccccaggctcctaaccaccgagctgcgggcctggagaatggccactgcctctccaaggacagcagccctgtgggcttggttgaagaagggggcagcaggtctgcagggtgggggttggctgagtgggagctgcagggccctgccagcctcctcctaggcaaggggcagagccctgtgtcccctgagacctcctgcttctctaccctgcatgactggtatggccaggagatcgtggagctgcggcagtgttggcagaagagggcccaggggagccactcaaaatgtgaggaacaggataggccctaagtctgggccctttgagtcaggaaaccagggccagttctttttcaggagttaaatgtttacgcatttccaaggttgcgttttgggaggggacatgggttctctccttcctgctatttaggcattctccaggttcgagatccacccgtgtgtctggaagggactgcgggaccattccttccatcctctttatttcctgaggtccagagaaggaaggagacttagcagccacagagcaagaccccaatctcctgactgcactggcctgactgccccctcccaggggatgttaatgaaatgaaggaagtggggaatgtcacccgagactgtcacaggcttgccatacctttggcctacacaccgggctctagagccataatttccaacctggggagtctcctgtgcacttaaatccgaggtaggctgcagtatcggcttgaagctctgacactgtcagagaaagtggatttattgtgtcataggagtttctgggacccagctcttcctgagaggggtgggaagattggggatgggatcctcactcagcagtctgggtagggccctttgaggcagagggtcttcggccagtgaagagagatttattctgcttctgctcagagtgctggggtcccatcctttctccctggctgccctgttaacagatggtgctggaccttgccccggaaggggcttgtagcttttttacgtcaacgaaatgccctcctgtactctgtcttcagcagccaactcctggagctgccaagtgaggggttaaagaagaggtggggaggcagtgtggctccctgggaaaagtctgttgctttggttctcagtcctgggtattctaggagcttggacacgggattgcgtttcctgtgctaaaattctctctcctggctgggctccggtaaactgaagctgctcgagaaatcacctgggaactctcatagccgtttgtcacccagggtgtacttgccaggacctctccttgctactcttcccaaagtcgggaggcaaagcggctgggtcaccagagcctgaccatactgacgctccagggggaagacgcagaggccgggaagagacaccccctcccaaacacataaaacttgccccttcctagcctcggctcccctcactggggccttgggcaggaccgacccgcatccaactaggcctaaggggtaggctctgagcctcttacccctaagaggcggagatgcgcccaaggcgggcgcccggcctgttccccagccctgcctggaagccccgcagccactgcattttgtttaaacacagatagcacgggcctttctcttattgctacagtgttttgtacacggttaaaacactagtaaagctttttcgttattaaaaaaaaaa

SEQ ID NO: 369 - DNA, 466 bp, Homo sapiens
atgctagccattttcaaatatctcatcaacaaccgactaatcaccacttaacaatgactgaaaaactaacctcataacaaatgataaccatacacaacactaaaggactaacctgatctcttatactattatccttaatcatttttattgccacaactaacctcctcggactcctgccttactcatttacaccaaccacccaactatctataaacctatccatggccatccccttatgaacggtcgcagagtttataggctttcgctctaagattaaaaatgccctatcccacttcttaccacaaggcacacctacaccccttatccccatactagttattatcgaaaccattagcctactcattcaacccatactcctggacgtactcctaaccgctaacattactgcaggccacctacttattcacctaaattgaagcccactctaccaaattaaccataacct

SEQ ID NO: 370 - DNA, 577 bp, Homo sapiens
gaaataaaatgattaaatataaataaaaaatataattatattaaaagataagattattataaaattataatataataaaaaaatgaatattatataaataaataagtaatataataaagaataatataaataaaatatgaaaaaaataataaaataattaaatatattatagccaagtgtcaactccaactattgtaaaggtctcaagaaacctaggaaaagtgggcagcaaatgttgtaaacatcctgaagcaaaaagaatgccctgtgcagaagactatctatacgtggtcctgaaccagttatgagtgttgcatgagaaaacgccagtaaatgacagagtcaccaaatgctgaaaagaatccttggtgaacaggcgaccatgcttttcaactctagaagtcgataaaacatacgttaccaaaaagtttaatgctgaaacattcaccttccatgcagatatatgcacactttctgagaaggagagacaaatcaagaaacaaactgcacttgatgagctcgtgaaacacaagcccaaggcaacaaaagagcaactgaaagctgttatggatgattt

SEQ ID NO: 371 - DNA, 298 bp, Homo sapiens
  misc_feature (1)...(298): n = a,t,c or g
gcacgagccgacatgctgcgtgatggtgtggcttcctcgcccctctctggggtgggtgtgggggtggagtggccttncccacgcctctcacctctgccttcatttgtgctgccaccctgcccctccctcgtcctcctctcccacttcctcctctctgtgtgcctcagtctcctgccggaagaaatgggttgagcccgaaaggaggctgtctgaggaagggagagggagggcctggggtnnntnnnnnnnnnnnnnnnnnnnnnnantntntnntnnntnntttttttttttttatttt

SEQ ID NO: 372 - DNA, 393 bp, Homo sapiens
aatacagggtctctctccacaatgagttatttgatgctgaacaagagtgatgtggcctctgaaggttctcccacattcactatatttacaaggtttttttttttccatcatactttctttgtataattaaatctgagttttgtttgagcatctttcaacatgtaccatatttatgacaattctcttccataggatctatctgttctgcaacaagtattgatcttacagtaaaatttttcacaaattcattaaattctatgtctctttttctggaaggaatttttgtgcaggtagctatctcttgccctaaattattctccttgtttagctgctgattcttaaactggcctctagatttccagatttcttccggtacagactttctctttgcag

SEQ ID NO: 373 - DNA, 391 bp, Homo sapiens
ttggattcagtttgatagcattttgttgaggacttttgcatctctgttcatcagagatattggtctgtggtttacttcttttgttatgtcctttcctggctttggtatcaaggcgatactggtttcacggaatgagttagagagaatttcctctttttcaatcttttggaatagattcagtaggattggttccaattcttctttggatgtctggttaattcagttgttaatccacctggttctgggctatttttttttcttttggaggcaattttatttttattattttattttattttatttttattaatttttttatttttattttattattatcatttttttgagatggagtctcactctgtcacccaggctggaatgcagtggcatg

SEQ ID NO: 374 - DNA, 424 bp, Homo sapiens
  misc_feature (1)...(424): n = a,t,c or g
cccacgttcagtgaggcaggtattattgtacctgttttatggatagggaaactgaggctagactctaaattactactctgaggcacatctttttttttttttttttttttgagaaaagggggttttttttttcccccgggggggggggaaaaaaatttttttggtttaaaaaaacccttcttttggggggggagggtttttccccccccccctcttaaaaaaaaaaaaaaaaaaaaaaaaaaaaaaaaaaaaaaaaaanagggggggggggccttaaaaaaaaaaaaaaataaaccccggggggggggggaaatttttttttttttggggggccaaaaaaattttttgggggggggggtttaaaaaaacgggggggggaaaaaacccgggccccccaaaataaaaagggggtttcccagnnnnn

SEQ ID NO: 375 - DNA, 414 bp, Homo sapiens
  misc_feature (1)...(414): n = a,t,c or g
gttcgcttttatcctccagagccgncgcatacacttcttctccagtgtctcagtgccgttgctttctcccaaccctgtccccacccctccaggctttgaacccttgctgtgcatcaggccccccatgttcttcttgagcttgctgcccaaggttttgccaaagctgcccagtttgttagccacagaatctgctctcttcttgtccttctcccgatctcgctttgacttctccttccgccggccgccctcgttgctggtggaactgctgccaactgactccttgtctgagtctccagactcaggagtggaccggggctcatctccagctgaggcggtgggggactcaggctgggccagaggagcctgtgcatcagaggacagtgggatccacttcacattcatgtagctatgcag

SEQ ID NO: 376 - DNA, 417 bp, Homo sapiens
aatacattgcccatagctttctgctttgtggtgaaaggccggcgatctgatgccacgatgttcagagtgtcattggccagcaggctcatgaggtaggttgaggtgttggtgtccactctcacgggaggcaccgtgacataagcagccgcgtgggaccagtcctggcggtagtagtgtaatcctgtttccgtggcatagtgcagcggtgggttccgccagcacaacctttccttgcatcttaccagctgtgataacgtcaccagccgacatactggacaccgttgaccagggagactggacagtgagtcctgtctcgattggctatacccccatgagtgtgatatgtgagttacctctcttgtaccgctgattcgctcccctcttcccctgtgattctcgacctcgcgctccatcgcc

SEQ ID NO: 377 - DNA, 551 bp, Homo sapiens
  misc_feature (1)...(551): n = a,t,c or g
tcgcactgagtttatngagagtcccgcccacagcctggcattcctgggtgtctgttcccctggctgctccccatcaccttctctcaccctgggccctgtttttgttccctgcctcatgcctgactgatcatcttgcccttctgccaacataacttatcttgccagctaggccgggagctccctgcagcctggaactgtgaggctgtcttgtttcgcttggcgtttcccatgcctggcagagggtaggcacttgggaaatatttgtagggtaaatgaatgcgggatgaatgagtgcgtgaacgagaggaacagaaatttcgcgcattggccaatggatgggtggggaaggaatgtctgggctcacctcctggttcctccttggagagatgaacccctgagggctcagggagcttaacttgcttcttaccctcagcatcaccatgaacggagagaccatcgcctgtgctgagggctgccaggccatttgtgacaccggcacctctctgctgaccggccaaccagccccattgcccaacatcagagcgacattg

SEQ ID NO: 378 - DNA, 527 bp, Homo sapiens
cttctggataactgtcaaatgacagttcttggagcacctacctgtatccatggaaatactgtctctgtgatctgcacaggaagcctgacccagccactgtttccatgcctcgcaaatgtatctgacccatatttgtctgcagttccagagggcagtgctttgatctgcttagaggacaaacggctccgcctagtggatggggacagccgctgtgccgggagagtagagatctatcacgacggcttctggggcaccatctgtgatgacggctgggacctgagcgatgcccacgtggtgtgtcaaaagctgagctgtggagtggccttcaatgccacggtctctgctcactttggggaggtgcagggcccatctggctgatgacctgactgcacaggaatggagtcccacttgaggcaggccctttcggagctgtggcctcaatgatggatgccaatggagacgctgggtcatgtgtcaaatttcatctcttaggcttactgggaactatataaaagctatttcgagcc

SEQ ID NO: 379 - DNA, 402 bp, Homo sapiens
  misc_feature (1)...(402): n = a,t,c or g
gagactctggaaatccttttgcattaaaaggactttacacacctgtgtaaaaggatgtgggagaggagggtctgaagctgagctgctaaatgaatatccctgctctgctggtcaataaaacgcttcctaatagcanaaaaaaaaaaaaaaaaaaaaaaaaaaaaaaaaaaaaaaaaaaaaaaaaaaaaaaaaaaannnnnnnannnnnaaaaaannnaaaaannnnnnnnnnnncccaanaaaaaaaaaaaaaaaanaanaanaaananaaaananaaaaaaaaaaaaaaaaaaaaanaaannaaaaaaanaaaaaaaaaaaaaatttaaaccccnaaccccnaannanaaaaaaaaaaaaaaaaaaaannnnnnnnnnnnnnnnnnnnnaaannaannnan

SEQ ID NO: 380 - DNA, 338 bp, Homo sapiens
cttaaatcagtatttcagtaggaaaaattcttagaaattaaactgtgagggcaagcaattgtgaacatttacattttaataagtaccaacaaattaccttaaaacgtgtaccgatggatactcttagtaaaatgtaagagagtgattcactacattcttactagctcaggcattatcaatttttttttattttaaattactgcctaagaaatacagtcatatatcttgttcttttattttaaatttctatttgagaagttatgcacttttgtttgtttgttttttgagacagagtcttactctgtcatccaggctggagtgcagtggcacaatctcag

SEQ ID NO: 381 - DNA, 423 bp, Homo sapiens
agtatttagccatattagcatatctttagaggaggcctggtggaatacccggggcctctactagtctgtttttccggtcataggaagacttttttttttacgtatcaaagtatgcgtgaacagccccaaaaaaaaaaaaagggggcgcccccctaggaggccccccgaggggccccatcttaccgcggatacccgagaacagacgtcccccctaatagggggcccttttaaagcccagccccggcccgcggtttaacaccgcctggccgggaaaacctgctccccgggaatctttgaaaagagccccttccttgggggggggcccaaagcggcccaaccccccaccggaggttaaagcctctggggcagataaaaaattgtagggggataaaggggcaaaccaagctccatcgcccgcgggcg

SEQ ID NO: 382 - DNA, 365 bp, Homo sapiens
gctatcatatagtgcaacccagtccatgacccctagcaggggccctctcagccctcctaatgacctccggactagccatgagatctcacttccactccataacgctcctcatactaggcctactatccagcacactaaccatataccaatgatggcgcgatgtaacacgagaaagcacataccagggccaccacacaccacctgtccgaaaaggccttcgatacgggataatcctatttattacctcagaagttattttcttcgcaggattattctgagccttttaccactccagcctagcccctaccccccaattaggagggcactggcccccaacaggcatcaccccgctaaataccctagaa

SEQ ID NO: 383 - DNA, 125 bp, Homo sapiens
cttatgaattcgaacagcatacccccgattccgctacgaccaactcatacacctcctatgaaaaaacttcctaccactcaccctagcattacttatatgacatgtaaaaaaaaaaaaaaaaaagg

SEQ ID NO: 384 - DNA, 371 bp, Homo sapiens
cccacgcgtccgaaaaaaaagaaagaaaatattttaaaggtcagaagctacaagcttttcatcatttagccaagactccatctcaaaaaaaaaaaaaaaaaaaaaaaaaaaaaaaaaaaaaaaaaaaaaaaaaaaaaagggggggggggcaaaaaaaaaaaaccgggggggggcaaaaaaaagggggggggggaaaaaaaaatttttttttttaagggggggggaaaaaaaaaccccgggggggatttgggaaaaaaaacccttttggggggggggggaatgggggccccccccccccaaaaaaaaaaagggggggggggaaaaaaaaaaattttggggggggggggggggaaaaccccccgcaagcgggg

SEQ ID NO: 385 - DNA, 531 bp, Homo sapiens
tttcgtggcagctgaggtgagagacggcggcggcggcgcgggcacccggccccccagcgggaggatgaagcggcggaacgccgactgcagtaagctccgccgccccctaaagcggaaccggatcaccgagggcatttacggcagtacatttttatacctgaaattcctggtggtgtgggcacttgtcctcctagcagattttgtcctggagttcagatttgaatacctgtggccattctggcttttcatcagaagcgtctatgattccttcagataccagggactggtatgtctggtaatacatgttttccatgtgtggggaccattcagctgtttagagtagatgttattagcaatactcaggtaactatgttaggattagctaatagggtctgttaactgaaattgacctctaaactattttgtctaaacccattgatcaaatagttacattttctcctcctctcccattccagtgaaacagaacagtggaggaagcaataattactcaggcttttggagggctgtatt

SEQ ID NO: 386 - DNA, 459 bp, Homo sapiens
gaagctgatccttaagcggcgcatacaggctaggttaagtactgaatcattcctacatgattcctggcaggagaaacgtgacaaggtgcatctcaagacaactagaagtgcaacctcacgccttggaattgccggataaatgttccttggcctttgttgtacgcatcaaaaggattgatggcgggagtttactggtgcagagaaccattgcaagactttgcctgaagaaaatttttagtggtgtctttttaaaaatgctgcgtatagtggaaccttatgtgacctgaggatttccaaatctgaagtctgtctgggaattcattttgaaacatggacaagccaaggtcaagaataagaccatcggccagacgcagtggctcacgcctgtaatcccagcactttgggaggccaaagatgggtggatcatgaggtcaggagatcgagaccatcctggccaac

SEQ ID NO: 387 - DNA, 456 bp, Homo sapiens
ggaagtgcgaagccatgtgaaggtgctgggggagatgctagtcatgtaccgcaggccagggcaggccccgcccgaccaggaggccctgcaggtcgtgtatgagaggtgtgaaaagctgcggcccacgctgttccggttggcgagtgacaccactgatgacgatgatgcactctcggaaattctccaggcaaatgacctcctcacccaaggagttctgctgtacaaacaggtgatggagggccgggtcacctttggaaacagagtgaccagctcattgggagacatccctgtctccagagtctttcagaatccagcaggctgcatgaagacctgccccctgattgacttggaggtggacaatggacctgcgcagatggggactgtggtgccatctttgcttcatcaggacctggcagccttgggaaatagtgatgctcctgttacaggcatggtttt

SEQ ID NO: 388 - DNA, 1091 bp, Homo sapiens
cggacgcgtgggcggacgcgtgggcgcgcgccggaagtacctacctgggataacggcggcgagcggacggctgcatttacggggtctcccggagggccagagtcgtggcttacagaagagacgaaatgtggtctgagggacgatatgaatatgaaagaattccgagagaacgagcacctcctcgaagtcatcccagtgatgaatctggttatagatggacaagagacgatcattctgcaagcaggcaacctgaatacagggacatgagagatggctttagaagaaaaagtttctactcttcccattatgcgagagagcggtctccttataaaagggacaatacttttttcagagaatcacctgttggccgaaaggattctccacacagcagatctggttccagtgtcagtagcagaagctactctccagaaaggagcaaatcatactctttccatcagtctcaacatagaaagtccgtgcgtcctggtgcctcctacaaacggcagaatgaaggaaatcctgaaagagataaagagaggcctgtccagtctttgaaaacatcaagagatacttcaccctcaagtggttcagcagtttcttcatcaaaggtgttagacaaacccagtaggctaactgaaaaggaacttgctgaggctgcaagcaagtgggctgctgaaaagctagagaaatcagatgaaagtaacttgcctgaaatttctgagtatgaggcgggatccacagcaccattgtttactgaccagccagaggaacctgagtcaaacacaacacatgggatagaattatttgaagatagtcagctaaccactcgctctaaagcaatagcatcaaaaaccaaagagattgaacaggtttaccgacaagactgtgaaactttcgggatggtggtgaaaatgctgattgaaaaagatccttcattagaaaagtctatacagtttgcattgaggcagaatttacatgaaataggtgagcggtgtgttgaagaactcaagcatttcattgcagagtatgatacttccactcaagattttggagagcctttttagatttttctgctcaggctaaaaaaaaaa

SEQ ID NO: 389 - DNA, 1887 bp, Homo sapiens
ttttttttttttttcttaaatcaggttgtatttattaaaaacaaaatacaaaataacttggaattcagattattgtgatgtttatcccctaacaggtcagtcctaaagaaaaagctaattgtttcaagggtggtaacggaagaattttaagtaaggattatattaaatacatctagtttgatgcaaactgagttttattcaatgttggaggcctcactatgttcctctaagttttcaaccattaacaacccaaaccggttgtttccctcataccaacacttggtgtgtgcagtggttctccctctgttcttagaacagctggtattctgtttcttctgcctttttttttttgaatttgatctaccttttggtaggaatatttcagcgggggcatatgaccttgtggcattgaatagatattcataaagttgcttagcctcaggacatatgctcaggagactttctacagaggtcgatgctagcagttgctggcatagtccgtgcaccaggcttccactgtacagtcgagttaggtctggctctgggagaggagtggacagcagctggttgagatacatcccccatctggagacaggactgccactgacagaagatgtgagctgtgtctaagtccagtcttgtgcccagccgtgtctgcgccttcactctttggaactctgcatacaacatcttagcaccatcttcctgcagctcttccttaccagggctgttgattatggcaatcaagggccccactagcattgtgagcagtaaggattgtagatgatgtagctttgctttggtctcggtgtgctgcaaccagtagcaactgacagcaatgggcaacttcagtgaagtagggattggctccagaatggtctgtttcaccttcagggtttctaacagaagcatctgccgcctcctcaaggagagctcagtcaatctgcttaagtcagaatgatccttggccagttctactgcatcaatgattgaggttctgatatttttattaatcctttccacttcactgaaagctagaggctgaggaggcaatgcattccaggatgtcttgtccagatgtggtgaggcatttaaaagaagcccatagatgatttgcctgatgggctgagatattctgtgggcatttggttgctgcatgttttccacctgtgtgggaagaatggtccgtcttaggaccaaagcatcactgatgaaaggagatagctggcctttagctaaagccactaatacccattctggtaaaccaagattcaaggcatctggacagacataagtaccacactggaagaagtcctgtagcttcacctgggactgttggtattcttccatggaacagcagagaagttccttaacattttctcgatccttttttgggaggtatttcagaacattatctagtgcttcggtagggttggcaaaatgagacaaccaattcagaagtcccaggattcggtggtgtctcctccctttagaactggtagctccaagaggaagacgcgctttacttaagaatgtctccatgatgggtagattaacatggtcatttccacatagccccgcaaagagaggtagtagagctttattcatattgctgaagtgatggcagaatgcatcaagggaaaagcatttggcagggatatagttttgtgtgcccttaatagtgttcatatttctccactgaaagctattcaatgggcaaaacccagttttcaggtcaaaaatgcaaaagtcactatctgatgataacacagggcaattccaatggttagcaagtgtcataatgtcccgatctgcttctgaaaagcactggacaaaacacacccgcagcttgatcaaaacctgtatgaatacttcccggatgagtaa

SEQ ID NO: 390 - DNA, 383 bp, Homo sapiens
ccctaatccatctgtgcattcttctggtctttttaaaggcagaggaataaacacacacacacacacacacacacacacacacacacacacacacacagagagaggagagagagaaaagagggagacagcttttttgtgttggtggaaagttgtttttttttaggtaaaaatgccgtgtttatatgagggatgactgtgatcacaattcctatcatttttttgtctctcctagataagtttagtataaatcaggctccacagtgtcttagtgttttttaataaaccagatcacactcattcgggtactctttagggataatttcacacagcagaagtcagcccaaacttctctagttatgtaacaaagcatgtagtggccacgg

SEQ ID NO: 391 - DNA, 301 bp, Homo sapiens
cgggactggtaaacatggcgctgtacgtttcgccgattgtttccggtgaggttatccgttcccgtggcggctccacctctgaatttacgccgggatatgtcaagccgaagcatgaagtgaatccgcagatgaccctgcgtcgcctgccggatgaagatccgcagaatctggcggacccggcttaccgccgccgtcgcatcatcatgcagaacatgcgtgacgaagagctggccattgctcaagtcgaagagatgcaggcagtttctgccgtgcttaagggcaaatacaccatgaccggtga

SEQ ID NO: 392 - DNA, 369 bp, Homo sapiens
tcagaatcaacttcttccagacccctgttaatgttgattctgacttttataactgacagtttcaaaagtcagaatcaacttcttccagacccctgttaatgttgctattttgatctccttccatgaaacatcagtgtttttattggcatctagaatgctgaattctttccagaagattttttctttgcccagattttggatctgggcaaagaggccaggaattcttcctaacatctgcaatgcccaggagagctcctccacaacaaaggattatccagccaaaattgtcaatagtgaaaaggctgagaaatcctatactggagaaagcatgtggaaacagagaagaaaaaaaaattaaaagacagaatg

SEQ ID NO: 393 - DNA, 339 bp, Homo sapiens
ttgcaatcaggctgtcagccttatgctcgaactgaccataaccagcgcccggcagtgaagcccacatattgctgcaacggtcgattgcctgacggatatcaccacgatcaatcataggtaaagcgccacgctccttaatctgctgcaatgccacagctgcctgacttttcggagagaagtctttcaggccaagctgcttgcggtaggcatcccaccaacgggaaagaaactggtagcgtccggcgcctgttgatttgagttttgggtttaacgcgacaaatttgcgagggcgatcggagtaatcagagaatagctctccgcctacaatgacgtcatatc

SEQ ID NO: 394 - DNA, 681 bp, Homo sapiens
ccaggaggaatggagtctccttagtgaggctcagagatgcctttatcatgacgtgatgctggagaacctgacacttatatcttctctaggttgttggtatggagcaaaagacgagacaccttctaagcagaccctttctatacaacaggagtccccactcaggacacattggacaggtggaaatgatgtcactctgaaactcaggctggaatacactggcatggtcatacctcactgcggcctcaaactcctggggctcaagtgatcctcctgcctcagcctcccgagtacctgagattagcccaggtaattcaagaattttttatagagatagggttttgctattttaccctgactgatgttcaactcctgggccttcaagtaatcctcttagccatacgccctttgaaagcactgggattacaggtgtgagccaccatggcccaggcccaaaaataatttttgtagaattagcatttctaggtagtgaagcagactgcaacagaatagttgggatatactttttttaaaaaggcatccacaatgattcagtcactatgtctgtgatggacaagcaggtacagaaattttcaggacctccataattatgaatctagtgtagcttaggtcattgtcagactaaatctaaaggttttgtggatttctgtagcctatcttggg

SEQ ID NO: 395 - DNA, 375 bp, Homo sapiens
ggataggaacaagaggacatcaacttttactgttcatctcctatgagccagacctgtcgaggagttgtatcaatttcaccccacttatcctaactagaacactggcatgacagaggagaaagcaaggtcagaaggagtaaggagctagtagtcagtaacaggctttcaggaatggtgattctgaatccaaacataatgggggcttaacagcttctaacagcccaataggttctaatacgcaaagaatgccaagaaatcttaagacaaattagtgtctcagtcttaccaagggagaccaggctgctatggttctcctgcttttcatctctgtagaggttcacctgagatgaatccagctgtgtccacccaggagtg

SEQ ID NO: 396 - DNA, 428 bp, Homo sapiens
gatagggcccaaagcacatttaacagaagagaaacctgatggccttatcaatgaagctactaggcaagttgctttggcagatatcgttctcattaataaaacagacttggttccagaagaagatgtaaagaaattaagaacaacaattagatccataaatggactaggacaaatcttagaaacacaaagatcaaggctcagcagctgatagactcagcaacaggcagccaggagctctgaggctcacagctggcagtctagttccactcagtctctacttgagaaattctttctttggaggtacagcagaggccttagaatctcactctggtttgagacagagtctcactgtgtcccccaagttggagtgcggtggtgcgatctcggctcactgaaacctctgcctcctgggttcaggcgattctcct

SEQ ID NO: 397 - DNA, 764 bp, Homo sapiens
gtcgcgataaacatatcaataatttgaaaaagaaatgccagaaggaatcagagcagaaccgggagaagcagcagcgtattgagaccttggagcgctacctggctgacctgcccacactggaagaccatcagaagcagagccagcagcttaaggattctgagttgaagagcacagagctgcaggagaaagtgactgagctggagagtttgctggaggagacccaggcaatctgcagagagaaggagattcaactggaaagcctgaggcagagagaaacagaattctcctccgctggacatagcctgcaagataaacagtctgtggaggagaccagtggagaaggtccagaagtggaaatggagtcctggcagaagcgatacgattcgctccaaaagattgtggagaagcagcagcagaagatggatcagttgcgctcacaagtacagagcctagagcaggaagtggctcaagaagaaggaacaagccaggccctgagagaggaggcccagcgaagggattcagccctgcagcagctgcgcacagccgtgaaggagctttcagtgcaaaaccaggacttgattgagaagaatctgacactccaggaacacctgcgccaggcccaaccagggtctccaccttcaccagacacggcccagctggcacttgagctgcaccaggagttggccagttgccttcaagatctgcaggctgtctgtagcattgtgacccagagggcccagggccatgaccccaatctctccctg

SEQ ID NO: 398 - DNA, 498 bp, Homo sapiens
  misc_feature (1)...(498): n = a,t,c or g
ccgcgtccnnnnaaaagganccatggtatcatncgtggaanctctctgngtctctgtagtgtcagagaaagtagattcacttattcttccctgtagatatgtgaagtagaaagtcttttgtcagatgaattctttattggatgcgcggtcactttcactaacgtccatgctctttgtatgtgaggtctgtgtgaaaatgtgtgaccctgccaaaggagcagctggccagagaaccatcgctgcccttctgccttgccttctggacaaaggaatgatgagcaccgtgacggaagttcgagccctcagcattaacacccttgtgaagatcagcaaaagtgcaggagccatgttgaaaccgcatgcaccaaaactcattccagctctgctagagtccttaagtgtattggagccccaagttctcaattatttgagcctccgggcgacagagcaagagaaggctgcgatggatagtgctcggcttagtgctgccaaatcttn

SEQ ID NO: 399 - DNA, 464 bp, Homo sapiens
  misc_feature (1)...(464): n = a,t,c or g
ggttagtncggtggacttcctacttgcctggcaccgctcccattttcttctcttggtttcttcacccacctctgcttcccatttctccccttcccatccccatctaccttgcgccccatgtcctatagtcttatcagagcctgtagccccagggggcccaggtgaggggctgctcctgcaggataacgcaatctccactgagatccaggctttgctttcctcctattacagtgacaggtgatagggctgggtaggcttggggcctgagctctgactagcccaaccctcccccaaccccttcctggtgccacagttattgagccgctggatgacatctcagcggtgacagacattctgacccatcgggagggcgcaaggctggagacacccccaccctggctggcaatgtttacagaccagcctgccctgcctaacccctgctcgcctgcctcagtgggcccagc

SEQ ID NO: 400 - DNA, 878 bp, Homo sapiens
tccgcaccgcaattcccgggtcgacgatttcgtatgtctgtgcccggatgattgttcgtgagtcatgaagggaagtgaagagagtatgatattgaaggcagaggtttggggagagggcataggagaggagtatttgtagcagatgggctgtggctagagttggtgtaaggcaatgctattagagattgagcaagtagggtcccagacagaaaaggaaacctaagagtagcagcagtggtacaaagggaaagggcaatctggaaccttatctgaattttctccccctttcccaagtcaacaacaagtttgggcttcgctgtaagaactgcaaaaccaacatccatgaacactgtcagtcctatgtggaaatgcagagatgcttcggcaagatcccacctggtttccatcgggcctatagttccccactctacagcaaccagcagtacgcttgtgtcaaagatctctctgctgccaatcgcaatgatcctgtgtttgaaaccctgcgcactggggtgatcatggcaaacaaggaacggaagaagggacaggcagataagaaaaatcctgtagcagccatgatggaggaggagccagagtcggccagaccagaggaaggcaaaccccaggatggaaaccctgaaggggataagaaggctgagaagaagacacctgatgacaagcacaagcagcctggcttccagcagtctcattactttgtggctctctatcggttcaaagccctggagaaggacgatctggatttcccgccaggagagaagatcacagtcattgatgactccaatgaagaatgggggcgggggaaaatcggggagaaggtcggatttttcccttcaaacttcattatttggggcccggct

SEQ ID NO: 401 - DNA, 120 bp, Homo sapiens
aatacatgtggtggggaaggacaggaacatcctctccagggcctccgcaccatactcgccagcgtgcgcgccgaccttaccccaggcggccttgacgttggtcttgtcggcaggacgaaa

SEQ ID NO: 402 - DNA, 384 bp, Homo sapiens
aatacaggtgggcatgtgctcttttatgtttatccgatccaggagatcctccacagacttgggctggggtggtcgtcctttccgacgcctcctggtggggcgtttgggtttctcctcgtcttcactgagcacgtccacgtagatgaacttgaacgtgccgactttgttgttcagcaggcccatccaggtccccatgggtggcttgctgattatatcgatgatatctcctttcttgagcttgagtgagtctgtgtcatagggactgggggtgaagtcggtgtgcaccctgtcacgcccgcagaacgggcctcggtaaggcggctctttcgcatccccatcttccgaattgacgctttcccggttggtggttgaggaatcagtgcg

SEQ ID NO: 403 - DNA, 485 bp, Homo sapiens
  misc_feature (1)...(485): n = a,t,c or g
ccgcgtcgaagcttgatcctcagagcggccgaatacatggggtgttgcgatacgcaggtccaggatgcggtcgtacacggccttggtggactggaaggtgccaaggctctcctccaggtcggcgagcatggaccagaccttcagtgacttgtacacgcggttctgcacgggctctgaaccatcaaagtactcggcccggcgggcaggcagcgccgtggcctttcgcagcagccgcaaggcctcatcgtagttctcgtgtcggagctccagctctccgcactgacaccacacgcttgccaggtcatccacctgcttgaagttcaccttggtggccttctccaggatgacacgggcatcgtccagctgtccgttgtcctcatanaacttggcaaacgccacccacagagtgtggggcttggcttgtgccttggaggggtccaccgtctgcacaaccctntgggtaggtggtggatgaactcccgggg

SEQ ID NO: 404 - DNA, 395 bp, Homo sapiens
ttgccttcgtgccatggttgagggtctgcgctgtgaagttgctgcagctcttaatgctctcctgcccctggagcagagtatccagctgcgactggaggactttgtgtttgaggccatagttgacctccaattccataagcagcacactcttgcgcacatttaaagtcttctggagctcatcaaaggtggaatgaatgtcatccacgatgctggccttttggttggttaactgatgaatgatttcagagatgaactgaagagcagaatctatttctgggagccttttgttgacagcatccaactggacctggagcgaggccttgtgctgttccaccacatccttgagtggaactgtggggagctctgcgtgctccccctccgtgcactcccgacaa

SEQ ID NO: 405 - DNA, 402 bp, Homo sapiens
ctcctatacacatacgtattactcgcatcaggagtatgggtggcctgagcttaccataggctaatagaaaacaaccgaaaccaaataattcaagcactgcttattacaattttactgggtctctattttaccctcctacaagcctcagagacacttacagtctccctttaccatttccgacggcatctacgggtcaacattttttgtagccacaggcttccacagacttcacgtcattattggctcaactttgctcactatctgcttcataccccaactaatatttgactttacatccaaacatcactttggcattcaagccgccgtctgatactggcatttagtagatggggtttgactattcatgcatggctccatctaatggtgaagggcttaaaaaag

SEQ ID NO: 406 - DNA, 2165 bp, Homo sapiens
  misc_feature (1)...(2165): n = a,t,c or g
ttttttttttttatttaggatcttttttttatttttatacacatgacaagattttaacaccaagaatagtccagttaaaatagtacaaatttacattccatgaggaaatgttaaaaaaaattccaactaaaaaacccactttttcctgtgacccataatcccaacattttaccagtgcaggggagaagggggattatgtgtgggcatccaaaacaagtcttctcccaaaaaagaaatgacttcaaaacttcacatttcccttctcacacagggatccaaatgggtgaggagtataattttacaatttcatcttttttcaggctgtaggattcctttggctggtttcttcttcttcatctgtttcccaccatcccatttcttgcactcttcgtctctgctctgtgtctttctgcttgtgtccttctgctgtctctttcagggttcttccttcggggctcttcttccacctttggcatcaggggtcaaatgttcaaaactgaggcgaagcattctttccaattccaatctccatatgcctttagtgtctgggtaaaaagataccctgacccgagccgttgccggtttcaaaccaaaaccacaagcaagatccaaaactgttttatcatccttcatcctcctttaattcgtcgaagcatgtctctgatccagcggtggtctgggaattaatttcaaatgttttctttctgactcgcatagtaaattgggtaagatgttctttgcccggttggtacgcttgtgctttcatgaaatctctcatgttgccagaccaatccgtactgggctggcccacccaaagcaaccacggagattctgtcaggcgctgagacaccacagccttttcaatcttgtccttaagggctttatctttcatccaattcagcagaggctcaaattctttctcaactgcttcacgactctccttagttttctcactttcatcgaacttcactccttccttggcaacattctggaacctcttcccatcaaattcgggaagggcctgaatacagtattcatccacaggttctgtgaggtaaataacttcatagccctttttcagaagtcgctcaacaaatggagaagattcagcctcttttctgctggacccagccatgaagtagattttgtcttgtttttccttcattctttccacatactggtctaggctagtaatgtcagttggatgatgagaagactggaacctaagaagtttagcaagacgtgttcgattcgagtggtcttcaatcacaccaagcttgatgttggtaccaaattctttccaaaaagtatcattgtatttatcatcagcaatcttcttgatcatgtccagcgttttacgaacaagcttcttcctaatcaccttaagcagtttatgttgctgaagagtctcgcgggaaacattcaaggggagatcatctgagtccaccacacccttgacaaaattgaggtatttaggcatcatatcatggaagtcgtctgtgatgaatacacggcgcacatagagcttaatgtaatcgctctttttagatccatattcgtcaaacagaccacgtggagcagatgtgggtacaaataaaattgatttgaaggtaacttccccttcagcagtaaagtgaatataagccatggggtcatcactttcctttgaaaatgatttgtagaaagctttgtattcatcttcttctacttcttttgatggtctctgccatattggtttgatatcattcataagttcccagtcccagacagttttttcaacttttttagtctttggtttcttttcttcttcttcttcctctactgcagcttcatcatcagattcttctttctcttctttggctgcttcttcttcctccatgggctcctcaacagtttcagtcttgctgctccatacataaataggaaagtttatgaactgtgaatattttttgacgagatttttaattgtatccaattcaaggtaatcagatgcagnagaagaaacagcaaaggaatctacagctgaaaaagatgaattgtaaattatactctcaccatttggatcctgtgtggagagggaatgtgaaatttacatcatttcttttgggagagactttttcctgtgacccataatccnacattttacagtacaggcggcccccccc

SEQ ID NO: 407 - DNA, 394 bp, Homo sapiens
cccacgcgtccggacgagttctagatcgcgagcggccgcccttttttttttttttttttttttttttttttttttttttttttttttttttttttttttttttttttttttttttttttttttttttttttttttttttttttttttttttttttttttttttaattttatatattaaaaatattttttttttttttcattttggaaattttatgttatttatcaaattatggggtgggggtgacatacaaagaatgagttattataagtaaatgttagagagttactttttcttcacaataaatatcttttttattggaaataactacctcatttctttgatttacaacatttacgcggttaagaggcaattataaatctctaataaaaatag

SEQ ID NO: 408 - DNA, 404 bp, Homo sapiens
  misc_feature (1)...(404): n = a,t,c or g
ggcagcaccacacctgccatggaatttgcaagtctttttaaaaaaattttattgattgattgtagagatggggtcttgctttgttgcccaggctggtcctgagctcctggcctcaagtgattttccttccttggcctcccaaatttttgggattacgtacataagccaccatgcctgaccacaatttgtggttccaagagtgtgatttttatcatcatttgggaggatgttggggcctctggcatgactgatgactgtctctgagtggagtgggctttggaagggcgatggggcttgctggacaccccattggaccgtcattttgatgtaggaggcctgtgggttgtcttgccctttaaatgtgggttggtnggaacaaaactctggtttgtcacaggcatata

SEQ ID NO: 409 - DNA, 380 bp, Homo sapiens
gaatcatcatgcgactggctgaatgcctatttaactctcgtgagatgtgcccaggattgagcggactattttgctgaacgtctgtacaagtcgatgaagggtgcggggaccgatgaggagacgttgattcgcataatcgtgaccagggccgaggtggaccttcatgggatcaaagcaaagttccaagagaagtatcagaagtctctctctgacatggtacgctcagataccttcggagacttccggaaactgctagtagccctcttgcactgagccatgccagggcactttgttcacagtgtggatccacctttgttaagagcccattccaaatcaaactttctaatgaaactttctgaccaaaaccctttttatttccg

SEQ ID NO: 410 - DNA, 400 bp, Homo sapiens
gaagcgtgaagtccaaacttgctgtccagactctagcttggctgggtctttgcttgtaccacccaaaaaaaaaaaaaaaaaaaaaaaaaaaaaaaaaaaaaaaaaaaaaaaaaaaaaaaaaaaaaaaaaaaaaaaaaaaaaaaaaaaaaaaaaaaaaaaaaagggggggctttaaaaaaaaaaaccagggggggaaaaataaataattggaaaaaaaaaaaaaatttttcttataaaaaaggtataaaaaaaaaaacccaaggagggtattttaaaaaaatggctggggaaaaaaaaatcattggggaaaatttttaaaaaaaaaattttttttggggggaaaaaaaaaaaagaaaaccccctaaaaaaaattaacctgctaggagaaaaaatatataat

SEQ ID NO: 411 - DNA, 1124 bp, Homo sapiens
tttttttttttgaattttagcatctggtgaatttattcagcataaccacaggcattatcttcatgctgtcacacacagacacaaacacagatacagcacaatatccatatttagcccaagtgcattccttctgaggctcatttatatgtcttcatatgccacagcccatcatttaaataatggatattttcaatgccaattcctttgttgactttctcaatgtcttctgcagacatcttcatgactccaacacatagagcatgctgttttccttctgccatgatagcaacaatggtatctactgcagcagggtaaagcttagctccaggagaagttaagcctggacacatgatatttgctccactgagtacaaatttgatggctcctttatcaacctgctggtgtggcaggataaaaggatatttgtgaagtaatcttagggttggataaaaaggcccttctctttgtctaaaaaagagtaattctccatttactgtaaggatttctatatgttcatggcatcggactattttgacaggatctttcttaggcatgatttgattaagccatggttcaatacctggaaattgctctatcaattgattcttaatacccttaataactgaagttttcaactggatgcagttggacacattttctttttcatcaaatttcttgaacatgatccaaggtgaagggggcgacgatagggaagggcccggaatgggaaagaaattgaatttgcaggggtccggcagatcccctcacacgaggaaggccggcactgacagtcggagctgtagtcgttatccggaaaacgagagccagccgcgctttacggctctcagtcaaatctgactacttccgctcctctggactccacgtaggcgcttttgccggctccttttaggcaaccggttcctcagcagttggaggtagctgaaagggcccggaggaaagccaggtacttcaacttgtttctgtagaaattgccagaaatgttgatgccttcacagcgtccgaccaccaccttccggcccagcagtacctgtttagccccgatggccgccaggcggcccaggagatggcctcgaccatcaagcaccaggacctgcacctccgcc

SEQ ID NO: 412 - DNA, 414 bp, Homo sapiens
ttttttttttttgaggacaaggtctcactctgtcacccaaggtgggagtgcagtgacgacatcacagctcactggcagcctcaacctggggttcaagtgatcctctcaccttcagcctccccaagtagttgtgcctcctaggcacacaacactatgccccggcaaattttttgtattttgtattttttgtagaaacaggatttcgccatgttggccaggctggtctcgaacacctgggctcaactgatccgcctgcctcggcctcccaaagtgctgggattacaggtgtgagccaccctgctcaaccaggttttattatttaagttagttaaactttggatagattgtataatatatagtttaatgtaatcatgctcatattttttaaataaataaaacactatactactgaaa

SEQ ID NO: 413 - DNA, 513 bp, Homo sapiens
  misc_feature (1)...(513): n = a,t,c or g
gatcgataccgtcgtgacattcgancccattnaataccacccactatggggaatctagccctcgggggcaagaattcctcacgagggtttgtagattccctgatctgcaattcttcccgtgccttcatggattggagggctctcctttcttccttgaatgactttgcatccctctcgtttgctgagagttgggacaatgttggattactggtggaaccaagcccaccacatactgtaaatacactcttcctgaccaatgacctgactgacgaagtgatggatgaggtgctgctaaaaaaggcacacctcattctctcctaccatccgtctatcttccgacccatgaagcgcataacctggaacacatggaaggagctcctggtgatccgggctctggagaacagagtcggtatctactctccttatacaacctaagaagcttgccccccagggcgtcaacaactgggtggcctaaagggcttggaactttgacccttcagccccaatcattct

SEQ ID NO: 414 - DNA, 1040 bp, Homo sapiens
ttttttttttttctgagacggagtttcactcttgttatacaggctggagtacaatggggtgatctcccctcactgcaacccgggttcaagcgattctcctgcctcagcctcccgagtagctgggattacaggcatgcgccaccatgcccagctaatttttgtatttttagtagagacagggtttcaccatgttggtcaggctggtcttgaactcctgacctcaggtgatccacctgcctcggcctcccaaagtgctgggattacaggcatgagccaccatgcctggccggatgtgaattatcttaaaaattttcaggtaattctaatgggccaaggttgagaacccctgctctgggcccatccgagcaccaggctgtcacaaacgcatgcatgcactcacgcccgtgggcttggggggcttcggaaatgtgcttctgcttttttgagatggggtctttctgttgcccatcccggagcacagtggcacgatcacagctcactgcagcctcgacctcctgggctcaggtgatcctcccgcctcagcctcctgagtgtctgcttctggttttcatgatgacctggggcccaggcatactacacttgtgctgttcaggggccagtcctgcaccaggagcccatcagccacagctccgccgagaagcactgatatgcagagctaagcagctttgtttccacgtggatcctgcgtaggttttcttggtccatccgtagacaccgcactcctgcagaggatcttctcgggatgccccactgtctctgttttccctcttcactgaacactcagtcggggctcgccatgatgcctctgtgtctgctggcttctcccccattggaacagccttcttggcacgccacactgctagctgctgggcactgtgctttctgcctttaccgttctgccgtgatgttgccaaaatagcagcaacaacaacaacaacaaaggctgggcacctggctcatgcctgtattcccagcagttcgagatcagcctgggcaacatggtgagaccctatctctac

SEQ ID NO: 415 - DNA, 661 bp, Homo sapiens
tgagagacggagtttcactctgtcccccaggctggagtgcagtagtgtgatctcggctcactgcaacttcttgtctccggggttcaagcgattctcctgcctcagcttccctagtagtggggactacaggcatgcaccaccatgtccagctaatttttgtattttttagtagagacggggtttcactatatgttggccaggctggtctcaaacttctgacctcaagtgatccactcaccttggcctcccaaagtgctgggattacagacgtgagccaccatgcccggccagggattttccactcttgaagggagtattttgttgtcactttcaactcgctgtttttttttccagacaacctcaaatatgaccacactacagcctgtacacaacaagacagtttatcttggtccatggggtaagtgtatgcctgatctttttaattcagtacaatctctgaaggtgttaacactaatgttttacaagaatgtagaggcgactcggtgctatgaagcgtgttaaacaactcacacaattgctacaaaacaccagggaggggctttttgtgtttttaatttttaaaacatttttccttttcttgtgagccatagtaggcctagagagattactgggtttttataattaaacatttatttcggtg

SEQ ID NO: 416 - DNA, 413 bp, Homo sapiens
  misc_feature (1)...(413): n = a,t,c or g
ggtgagtagtgtgattgaggtggagtagattaggcgnnnttacaaatagacgctaaggagggtgatggtggctatgatggtggggatgatgaggctattgtttttctcggcgctcaggaagcatggcactctggcgggcataccagcgggccctggccgctcacccgtggaaagtacaggtcctgacagctgacttctggggaggaaggcagcactgctggccccatgccagtagctatacctgccgacccaggcctcctggactgaaggacacgcttcctgctcctcactccaagaagccacttcttgcccctctgccttctgcgcatgaaactcaaaagccacaaaacagctggtggagaggcggggtctgcaggaacaccagagaggccggactctgaccatggtgtccc

SEQ ID NO: 417 - DNA, 517 bp, Homo sapiens
aatacagctgctggcttggatggagggctgagccactgactcgtatacacggagatggtgagatgcctgttcaatctgagaatttctgtatgtgacttgtaggttgtagtatcccgtgtcctctagggtgacgttctggaaatgcagatctccactgggtgatattgtctctcgaccgctgtatgcaggccctggagtcctaacgtgagtgtctattacatatgctgcgattagctggttgggctccaccgttttccctttgtaccagccatagctgtaaagattctcgcgcagataaaccacagagagatgaacattctccccttcagcaacttcatagggcgctgatgcaataaagagccaggcagtggtgggtgcctctcacaaagctaacatgtgatgctgtgagcaagagcccctgcccgggatgcattttcttgggggaccccctgagggggcccccaagtctttgcctgctggtctgttcttctttgggacaaggccttggcttccgacg

SEQ ID NO: 418 - DNA, 621 bp, Homo sapiens
  misc_feature (1)...(621): n = a,t,c or g
cgacgatctcgtgcgttgccggcgaagaggggagcctgacgactcggaaatttgaataccacagtagcatggagtgtgacctcatggagactgacatcttggagtcgttggaagatctaggttacaagggcccattgttggaagatggagcgctctctcaggcagtctctgctggagccagttcccccgagtttaccaaactctgtgcttggctggtgtctgaattaagagtgctctgtaaactagaggaaaacgtgcaagcaactaacagtccgagtgaagctgaagaattccagcttgaggtgagtgggctactaggggagatgaactgcccgtatctttcactgacatctggggatgtgaccaagcgccttctcattcagaagaactgcctcctcttgctcacatacctcatctcagaactagaagctgccagaatgctctgtgtgaatgctcctccaaaaaaaagctgaagaattggaacatagttatattggctggaggtttggacattcctagagcaatacatatgcctttcaactcttgaaagacctcactcncgcctccttcttgcggacgcgtgggtganccnnnaattccggacgggtaccgcagtgaacg

SEQ ID NO: 419 - DNA, 354 bp, Homo sapiens
gaaggggagagctacagagtgattaccccccaaacgcccacccaatagggtttagaagcttaaataccacctaaaggttacaaaaagagtgtgggctcggatcagtggcataacatgttcggggagctggagaaggggaagcctggctagcaaaggtggtcttgttatgtaaatgaagccccacaggtggcagccctcaaaagaatagatggtaaatgttttagaccttttttgttgtatgagacagagtctcgctcttattgcccaggctggattgcaatggcacgatcttggttcactgtggcctccgcctcccgggttcaagcgattctcttggcctcagcctcccaagtg

SEQ ID NO: 420 - DNA, 368 bp, Homo sapiens
gcaacctcaaacagacaccatggtgcacctgactcctgaagagaaggctgccgctactgtcctgtggggcaaggggaacgtggatgaagttggtggtgaggccctggtcaagctgataggggcctacccttggacccagaggttctttgagtcctttggcgatctgtccactcctgatgctgttatgggcaaccctaacgggaaagctcatggcgcgaaagtgctcggtgcctttagtgatggcctggctcacctggacaacctcaagggcacctttgccacactgagtgagctgcactgtgacaagctgcacgtggatgctgagaacttatgctcctgggcaacgtgctcgtctgtgagctggcccc

SEQ ID NO: 421 - DNA, 418 bp, Homo sapiens; identical to SEQ ID NO: 77

SEQ ID NO: 422 - DNA, 418 bp, Homo sapiens
ccacagactcagagagaaccgaccatggggctgtctgctgccgactagaccaacgtttaggccggctggggtaaggtcggcgcgcacgctggcgagtatggtgcggaggccctggagaggatgttcctgtcctttcccaccaccaagacctactttccgcacttcgacctgagccacggctatgcccaggataagggccacggcatgaaggtggccgacgcgctgaccaacgccgtggcgcacgtggacgacatgcccaacgcgctgtacgccctgagcgacctgcacgcgcacaagctttaggtggacccggtcaacttcaagctcctaaaccactgcctggtggtgaccctggcctgccacctactcgccgaggtcacccctggggtgcacgccttcctggacaaatttcctggcg

SEQ ID NO: 423 - DNA, 440 bp, Homo sapiens
gttgggtggaaaaagactttcttctctattttcctagttatatatgctatcatatgtctgttatactcctcttgaagttaccctgaaacctgggctcttgaagacgcatcactggagcagatggataatggatactggggctatatgatgactgacccagtcacattaaatgtaggtggacacttgtatacaacgattctcaccacattgacgcgttacccggattccatgcttggagctatgaatgggggggacttccccacagcttgagaccctcaaggcaattactttattgatctagatggacctcttttccgatatgtcctcaacttcttaagaacttcagaattgaccttaccgttggattttaaggaatttgatctgcttcttaaataatcagatttttaccagattgagcccttgattcagtgtatcaatga

SEQ ID NO: 424 - DNA, 341 bp, Homo sapiens
ggcacgagccaggggcgttgggaacggttgtaggacgtggctctttattggtgagttttccatttacctccgctgaacctagagcttcagacgccctatggcgtccgcctcgacccaaccggcggccttgagcgctgagcaagcaaaggcctcaatccactaattccttgcgctctccgctgggcccgctgtctgttctccgacgcctacccgggacgcctccctgggatgcttctggcgcgcagtggtcctcgcggaggtgatccaggcgttctccgccccggagaatgcagtgcgcatggacgaggctcgggataacgcctgcaacgacatgggtaaga

SEQ ID NO: 425 - DNA, 354 bp, Homo sapiens
gcccaggctggtcttgaactcctgacctcaagtgatccactcaccttggcctcctgaagtgctgggattacaggcgtgagccaccacgcccggcctgtgttctcatttcctcctattgtccaaatgccacaccctctgtgaagccttcctgatttccataatcaattaattctcctttctctacaatatgtacctcactagatttttttattaagtgaggtagggaataaaataataagagcttgcctttaacaagtacttaccatagaataggcattttgataagtgcttgacaagcataatctcattttacctcataacactgaggtagatgctattattatccccctttta

SEQ ID NO: 426 - DNA, 334 bp, Homo sapiens
ttggcttgtatatcatattggccacttcccttatagcttattccaagccaccaaggaagtccttgcttatcctagaagatgaaaaagcatgagaaccaagacctagctgttaactcttctagaagtgaataaaatttaccaatttcacctctttttttttttttttttttttttttttaaaaaaaaccctgggggggccccccgggtgggaaataggggttaaagctaaattttttggaccctcccccccccgggttaaaaaaattttttttcctaacccccccaagggggggggataaaaagcccccccccccctgcccgtatatttttttgt

SEQ ID NO: 427 - DNA, 455 bp, Homo sapiens
  misc_feature (1)...(455): n = a,t,c or g
nttcgaagatagatagaccagtgcggcggaattcctagcgttaaaggcactgcagagaaatgaggtgcagaggtggcccctctgagtatttattttactcaggtaccagtggtacatatatacagtgtaattatgaccaggctggtaaaattggctgctcgcaaacaatccccttttttcctggcagtatttggaatttatcatttattaataactatacatttttaaaggcagaagaagaaaatctatctatctatctatctatctatctatctatctatctatctatctatctatctaaatgacctgacagaagaaaactgttaaaaatggatattattggaggggatttaaaacagtgggtgtgaattatcattctgatggaaagaaaatagcaaaacaatgtgttacaagtatttgctaataaacagtatactgccagcttctaattgctn

SEQ ID NO: 428 - DNA, 389 bp, Homo sapiens
attagccgggcgctcctgtcatcccagctactcatgaggcagaggttgcagtgagccaagatgacgccactgcactccagcctgggtgacagactatgactccatctcaaataaaaattaaactgggggggactttataaaaaacattatgaggaacttacaggatgccattattgggagtgtgtacttccatgttgaaagggtaaacaggctaaattgactcactgctttaaaagagaaagaaaatattgtgggcgggatttgctccttcttctacccgagcagaatgactgggttctgaaacccaaaagacctcattagatttgtagtgggtatatatttgaacgtagagtcatctcataaaatttttgtacaacagcctctctcct

SEQ ID NO: 429 - DNA, 404 bp, Homo sapiens
  misc_feature (1)...(404): n = a,t,c or g
ttttgctggtggctttgttgactttggtgcttgtgatggcggcctcctcactggcaatgagaagatcaccatgcaggcacactcatcacagcgctaagctcgcactgattttttacctgagtaggcctagaaataaacatgctagcttttattccagttctaaccaaaaaaaaaaaaaaaaaaagggggggcccttttaaaggaaccaagtttaaggcccggggggggggaaggaaaaatttttttaagggggccccaaaattaaattccggggccggggtttaaaaacgggggggggggaaaaacccgggggtaacccaaataaaagccctgtggaaaaannnnnnnnnnnnttntgnnntgnttnaggcncaataagttgctggtttttatcaaaaaaaaaa

SEQ ID NO: 430 - DNA, 473 bp, Homo sapiens
gcgtttctgaggagaaactcttggtgagaattcccagagtgataggggctacctacagcctggcgaacgagagactacgcgctctggaagacattgaacgggaaatcggcgccatccttcagaatgcaggtactgtgatcctagaattgtccaaggaaaaaactaacgagcggctcctagaccggcaggcggcggccttcaccgcttcagtgcaacacgtggaggcggagctgtcagctcagatccgctacctcacccaggtggccacagggcagccccatgagggctccagctactcttcgaggaaggactgtcagatggctctgaagcgagtggactatgcccgcctcaagctcagtgatgtggctcgaacctgtgagcagatgctggagaactaggccagggagatggacccagagctgagagggagaccatcacctgtgccatgggacagaacctgggaacatgtaggg

SEQ ID NO: 431 - DNA, 411 bp, Homo sapiens
gccttgagtctgtcctggtctctggaatcacggagtctagtaaaggccagcacacagcagatatataaatgtacaaatgagtgaatgaagagaatctgattggccttaaggaacttacgcacttaaaataattgggcataagagaagcagtgaaggagtgcagaggcatcacctgaaagggatcactgagattctgatgaacagaccttctgcccgcaatgccttggggaatgtcttcgtcagtgagctgctggaaactctggcccagctgcgggaggaccggcaagtgcgtgtcctgctcttcagaagtggagtgaagggcgtgttctgtgcaggtgcagacctgttggatcgggaacatatgagttgatgctcaggaggggctgttggaaggctttatatttattcggg

SEQ ID NO: 432 - DNA, 411 bp, Homo sapiens; identical to SEQ ID NO: 431

SEQ ID NO: 433 - DNA, 411 bp, Homo sapiens; identical to SEQ ID NO: 431

SEQ ID NO: 434 - DNA, 398 bp, Homo sapiens
ggcacgagggctcggcgtggtattcttccaggatcttatagtgcagttctgaagacaaagaagactctttctatcctaggaattctaagaaaaaatgtaaagatttttcaaaacaccaggtgttttgttttgttttgagacgagagtcttgctctgtcgcccgtgctggagtgcagtggcgcgatctcggctcactgcaagctccgcctcctgggttcacaccattctcctggaagggggaggatgcagtgagcctaaatcgctccattgcacctcagcctgagcgacagagtgagaccctcggctccaatagactaagaagatggagaaagaactacaaggcccggcgagggggccacatgcctgtactccaagtactttcgtagggcaaggcgaag

SEQ ID NO: 435 - DNA, 391 bp, Homo sapiens
agaatgaagactattctcagcaatcagactgtcgacattccagaaaatgtcgacattactctgaagggacgcacaggtatcgtgaagggccccagaggaaccctgcggagggacttcaatcacatcaatgtagaactcagccttcttggaaagaaaaaaaagaggctccgggttgacaaatggaggggtaacacaaaggaactgtctaccgatcggactatgtgcattcactgtcacaacatgatcatggtagttatccatgtatggtaatgcattgctatgctggtctagtcgatcatgagtattcttcgagatggagttttactcttgttgcttaggtaggagacatgcttgagccccggaggcagtatgtggcaggacccgggatcgg

SEQ ID NO: 436 - DNA, 399 bp, Homo sapiens
  misc_feature (1)...(399): n = a,t,c or g
tcgcggacgcgtgggtctcaagtgatctgcctaccttggcctcccagagtgctgggattgcaggcatgagccactgcacccagcccaaagtatgcttttaaaaatatgtatatatataaaatttttgaaaagcaaattatgatataattcaagtatcaaattacttcatgctgtttcattgttcctattcacatgcgaaagcatgtgatcaattattgctgcatcacatatagactcattaggtggaaattatggcctcttctgtaaaaaagtaaggacattaaaatgtaagatgcttgatgaaaatctaagtggagaggctctttgtggctaacttattgagtgatgtatgaggtcgatgttcagagtaatatgcctctgtattatagtggtagaaan

SEQ ID NO: 437 - DNA, 299 bp, Homo sapiens
tgtttcacttcttcagaaagcctccggaatctaaaaagccctcagtaccagagacagaagcagatggattcgtccttttaggagatacaacagatgagcaaagaatgacagcaagaggcaaaacttcggacatagaggccaaccaacctttggagaccaacaaagaaaattcatccagtgtgactgtatcagaccctgagatggaaaataaggcaggccagactctggagaacagctcattaatggccgagcttctgagcgatgtgcccgtcaccctcgccccgcatgtgctggcagga

SEQ ID NO: 438 - DNA, 329 bp, Homo sapiens
  misc_feature (1)...(329): n = a,t,c or g
gtcaggtatgtcaaagaacattggcggagtcgaatagcatctatccagcgagtcctgtaagacttcatgctcttccacttccattagcacaccgctgagcctggaaaagcagactaaactatggaagcggccccggaaaatcatacaccacagagccccactagatttcagagagcacgtatggaaggggcctgaaaagaaaaggatagatccattagatgcattaatgaggtaaaaaaaaaaaattattgcctttatttggggatagaaaagggccaggtngaaaacattgaaggagaaagacagagagaccgagacagagaccgaga

SEQ ID NO: 439 - DNA, 363 bp, Homo sapiens
taactcggccccggaggcggggagctgctggaagatgaaggtgaacatctccttcccagccactggctgccagaaactcattgaagtggacgatgaacgcaaacttcgcactttctatgataatcgtatggccccagaagttgctgttgacgctcttgttgaagaatggaagggctatgtggtccgaatcattggtgggaacgacaaacaaggtttccccatgaagcatggcgacttgacccatggccgagtccgcctgctactgagtaaggggcattcctgttacagaccaaggagaactggagaaagaaagagaaaatcacttcgtggttgcattgtggatgcaaatctgagcgttctcat

SEQ ID NO: 440 - DNA, 415 bp, Homo sapiens
ccaagaattcggcacgagcgctgttttgccggaggagcccctcaggccgtagtaagcattaataatgtctttcatctttgaggggatctacgatggcttcagcagtgtgctccagttcctaggactgtacaagaaatctggaaaacttgtattcttaggtttggataatgcaggcaaaaccactcttcttcacatgctcaaagatgacagattgggccaacatgttccaacactacatccgacatcagaagagctaacaattgctggaatgacctttacaacttttgatcttggtgggcacgagcaagcacgtcgcgtttggaaaaattatctcccagcaattaatgggattgtctttctggtggactgtgcagatcattctcgcctcgtggaatccaaagttgagcttaatgct

SEQ ID NO: 441 - DNA, 473 bp, Homo sapiens
  misc_feature (1)...(473): n = a,t,c or g
ggagggcttttaattgaaacccattgagangcgtggaattccccggctcgagcggcccaacccttccctcaccctggcaccagacacccaggacttatttaaactctgttgcaagtgcaataaatctgacccagtgcccccactgaccagaaaaaaaaaaaaaaaaaaaaaaaaaaaaaaaaaaaaaaaaaaaaaaaaaaaaaaaaaaaaaaaaaaaaaaaaaaaaaggggggccctttaaaaaaaaagggccctaaaaaacccggaaaaaaccccgggggggttttttaaaggcccacccttttggggggggcccccccccggggttttttttggcgggggggggggcccccccacttttttttttaaaaaaaaaaaaaaaaatgttcttctttttggggaaggggggttttttttttggggncnnaacaaaaaacgagactcgagatatctctaaagaagaatagtaaatn

SEQ ID NO: 442 - DNA, 429 bp, Homo sapiens
gcgagcgtaagttaacttgacaggtctgagctaaagataaccccacacccactccaccttactaccaaacaaccttacccactacatttacccacagaaaggatacgcgatccaaatcgttacctggcgcactagagattggaccgcaagggacagatgagaaaccatcaccatgcgtaacatagcagggactaacccctataccttctgcatatgagaattggctccacttcaaagcctccggaaggggccaggcctgctgagcccccccagagcctgccctgttcctacccctgctgtcagccgtaccctgctgggcaactttgaggaatcattgctgcgaggacgttttgcaccatctggtcacattgatggctatacagcagaaattggagctagtgggtcatactgcccccagcacgtcacact

SEQ ID NO: 443 - DNA, 1204 bp, Homo sapiens
agcggggccggggctgcggggcgagttgtcggccctgggccgggagctggagtcccagactcataggtcccggcccagcccccgaagagccgcctcagccggggggagttgctcggactcaaacgtccagtcctcgtgcgaccgcgctgggtcggaagtgagcaggctgaggccaccatggagcagtgtgcgtgcgtggagagagagctggacaaggtcctgcagaagttcctgacctacgggcagcactgtgagcggagcctggaggagctgctgcactacgtgggccagctgcgggctgagctggccagcgcagccctccaggggacccctctctcagccaccctctctctggtgatgtcacagtgctgccggaagatcaaagatacggtgcagaaactggcttcggaccataaggacattcacagcagtgtatcccgagtgggcaaagccattgacaggaacttcgactctgagatctgtggtgttgtgtcagatgcggtgtgggacgcgcgggaacagcagcagcagatcctgcagatggccatcgtggaacacctgtatcagcagggcatgctcagcgtggccgaggagctgtgccaggaatcaacgctgaatgtggacttggatttcaagcagcctttcctagagttgaatcgaatcctggaagccctgcacgaacaagacctgggtcctgcgttggaatgggccgtctcccacaggcagcgcctgctggaactcaacagctccctggagttcaagctgcaccgactgcacttcatccgcctcttggcaggaggccccgcgaagcagctggaggccctcagctatgctcggcacttccagccctttgctcggctgcaccagcgggagatccaggtgatgatgggcagcctggtgtacctgcggctgggcttggagaagtcaccctactgccacctgctggacagcagccactgggcagagatctgtgagacctttacccgggacgcctgttccctgctggggctttctgtggagtccccccttagcgtcagctttgcctctggctgtgtggcgctgcctgtgttgatgaacatcaaggctgtgattgagcagcggcagtgcactggggtctggaatcacaaggacgagttaccgattgagattgaactaggcatgaagtgctggtaccactccgtgttcgcttgccccatcctgtatt

SEQ ID NO: 444 - DNA, 882 bp, Homo sapiens
atagagttcgatacacaagcggaggaattcctggagcgttcggcggacagtgagcatgcgtaccatatctgaagttcgtaaattgaaattgaacatgcgtaattaatctttctgaataggaaaaaatatatacacaacaaaactctccgtttatggaacatgcgcatttgttctcagtaagtttttcgttttgaaagtgagcatgcgcatggtgagtaggttggtccgaagtttgaaccggacagaagcgctggtcggcgtctggcggttgtttttagaggtaatacacctagtttgtggctcagcatgtcaattgtaacagtgcaacttggtcagtgtggcaatcagattggttttgaagtttttgatgctttgcttagtgactcacacagttcccagggactctgctctatgagagagaatgaggcatatcaagcatcttgcaaagaaagattcttcagtgaggaggagaatggagttccaattgcccgggctgttcttgttgacatggaacccaaagttatcaatcaaacgctgtcaaaggctgcccagtctggccaatggaaatatggtcaacatgcatgcttctgtcaaaaacaaggttctggaaacaactgggcatatgggtaagaataatttcttgtgattttcagtttagtgacagctacacagtcaattaatagatagcaaagttagaactgtatagttgatataccaagcacataatcttgaaattgctgttttagatttagaattttattttacccagaagaaactttcattccatgcctatgtctgtacttaaggtacaggtaatgttgaaatgaaggatatctttcagcagggttttccatcttctcactgtcatgctgcaaactaact

SEQ ID NO: 445 - DNA, 882 bp, Homo sapiens; identical to SEQ ID NO: 444

SEQ ID NO: 446 - DNA, 459 bp, Homo sapiens
  misc_feature (1)...(459): n = a,t,c or g
nttgannnttgtaagacactcttgaccatcattannacagcttggcacgaggcgcacatccgtcgagcccgaggggagatttgccggttcaattttaactgcgatattgatcttgggggtgactgtccctggccggctgtcgggtgggagtgcgagtgtgcactcgctcggaagtgtgtgcgagtgtgtatgtgtgtgtgccgtgtcgggctccccccttccccccgttttcccgtcgagtgatgcacttggaatgagaatcagaggatggaaatagtctgggaggtgctttttcttcttcaagccaatttcatcgtctgcatatcagctcaacagaattcaccaaaaatccatgaaggctggtgggcatacaaggaggtggtccagggaagctttgttccagttccttctttctggggattggtgaactcagcttggaatctttgctctgtggggaaa

SEQ ID NO: 447 - DNA, 387 bp, Homo sapiens
atactttcagtgtatattatatctacatgcatacattgtgtatgtatgtagatgtatatctacatacattgaaagatatatatctacatactatacaatgcatgtatgatacctttggctactacatccttcttaaatttcctgttgccacttatgacctgatttccttgaccagttattcctccttcaaacatccctcttacatgtgatagtcctcagcatttagtttccccaactttcccctaattatcagttgactcaattaccaccaaaatatcaatgacttttttgagacagagtctcactctgtcaccaggctggagtgcagtggcacgatcttggctcagtgcaacctctgcctcctgagtccaagtgattctcctccct

SEQ ID NO: 448 - DNA, 439 bp, Homo sapiens
tagaggcatatagtgataggcgaggggaaacttaagggtcaacctggagcatccgtggcagctccatgcgtgaggctggtgccacacagtatcccggtgttggcattgtctccaggccttctctgttccgcacgcagttacaaaacaaaagaacagttgccagcagttgaaagaggatgtggatccaaaccaaatgggggacagatactccctctatggactagatactcatggaagaagtcaagttagaagagcaactgaaggaggttgtggaagaatataagcttgcattgtcagatactgagggcttgcagcagagcatccaaaaattggtggatgaggcaaatatgtgtagcattcaaggcttctgcatggactcgttagaggttgcagatgttctggagaacggcacacagtgtgtttcatagcagaaattcag

SEQ ID NO: 449 - DNA, 2173 bp, Homo sapiens
gaattcccgctgtcgacccatgcgtccggcaaggtcaagtctggatgattactgtccttctgaccaagttgattctattcatgaaaaggtcctcaatatgctacgtgccctctatggaaatctagacctccaagtgtatgcagcagagtctcctccatcttgaaacaaacaaaacattaggctcctgttgtatcttggtttagtaacaggcccttaattaacttatttgtacatgagtcttccagagaacactgttttatattaactttcagttgaaatctttcagatattttgaatctctgaacaaccattgtcagttgtgaatgatggtaaattttttggcatcaagtctcataaccccaactgatagaactgttgcttatctgtcttccttaagtattttttagggttttgtttttttttttgttggtttgtttgtttgtcttcacttttcccccagggtctgttgagctgtatgagattcattcatacttcattaattcattcaactaatatttgttgaacacttacatgtaccagacattattaagtgctgggtatatggtaatgaacaaaatagacaaggcccctgcccttttaggggagacagatgaaaagtaaattccgggttatgagaaatgttttgaaggaaaggacaacaacagacatgtcttagtacttagggtatcatggctttataggaaagtaacattctctatcttttttttttttttaattttataaaaataaagatggggtctcaccatggttacccaggctggtctcaaactcctgggcacaagcaatccacctgccttcgccctcccgaagtgctgggattacagatgtaagtcactacccccagcccagaaactaacattctcaaaagctactaccaaaaaaaccccacaaatttgccaatccatgaaagtatcataggaagtctacctttccaaggaatttggcattgtggccctgctcttgccaaatgctctccagcattgttggtatcaaggtggtctggttgagtaaacttgaccaaacaaaaattaactgttttttgcttttctgtttttgttttgctgatcaaaaaagcccttcagggtcttttgtgcatccaggaggtcattgtagatatcaataatatagtgcctaagtgccactttattgccaagtctagattgatacttttttcagataaaccagctttttatgtaaagagtaagggaaaaagttaaatctttaattctgacctgccataaaataccccaaagatattaaactgtcttcccacccaccccccttcattaactaagacatccttcctggggtccacttctttaatcatgaaacttgattttctcaattggccagtcttctgatctttagtatctctttagttcagtaatttttacctacctacttgatttattttcctttaaaaggggaaatgacatttaaagaaaaacaaacacccatcattcctcagtcccaacacagcagttcttttcactcttgcttgtaactttcaggccttacccacatgtgttcctatagagttgcatgtagctaaaattatagtgtgctgcctaactttgtgctaataacgaaggacacacattatcattgcctcacagtggatggcacctgaccccatttttccaaggattctattttccagtgaatttttgtcaccgagttaatttcccaagtctgatagcatgaatgcttatttgtgctgtgaaaagcagagcagcctgagtcagctttccattttcataggataatatgtgccaaaaaaggtttattttcttggtaaaatcagaattgtagaattgtgctatttttaatttttaaaatttttggttagagcttatagacattacttttatgattattttgcgtgctaaataagttaaagggtatgttttgaactatagcactaattaatgtgtgtgatcctagtatgttgatagctttgattttgtgagtggtttactagtcatttattatgattcccatgaactctgatatgattcattgtggttttaactcaggttgaataaaagcatccatttcttttataggaaggtttgtttaattctcatgttctgtgatcatctctttgagaataaaattcagtccctaatagttgaaaagaaaaaaaaaaaaa

SEQ ID NO: 450 - DNA, 1533 bp, Homo sapiens
  misc_feature (1)...(1533): n = a,t,c or g
ggcacgagacaatggaagctgccccgtccaggttcatgttcctcttatttctcctcacgtgtgagctggctgcagaagttgctgcagaagttgagaaatcctcagatggtcctggtgctgcccaggaacccacgtggctcacagatgtcccagctgccatggaattcattgctgccactgaggatttagaaataccagcagtgcccatactccatagcatggtgcaaaaattcccaggcgtgtcatttgggatcagcactgattctgaggttctgacacactacaacatcactgggaacaccatctgcctctttcgcctggtagacaatgaacaactggatttagaggacgaagacattgaaagcattgatgccaccaaattgagccgtttcattgagatcaacagcctccacatggtgacagagtacaaccctgtgactgtgattgggttattcaacagcgtaattcagattcatctcctcctgataaatgaacaaggcctccccagaagtatgaagagaacatgcacagataccagaaggcagccaagctcttccaggggaagattcctcntttattcctggtgggacaattggtatgaaaggaaaatggggaaggtgatatcatttttcaaactaaaggagtctcaactgccagctttggcaatttaccagactctaggatgacgagtgggatacactgcccacagcagaagtttccgtagagcatgtgcaaaacttttgtgatggattcctaagtggaaaattgttgaaagaaaatcgtgaatcagaaggaaagactccaaaggtggaactctgacttctccttggaactacatatggccaagtatctactttatgcaaagtaaaaaggcacaactcaaatctcagagacactaaacaacaggatcactaggcctgccaaccacacacacacgcacgtgcacacacgcacgcacgcgtgacacacacacgcgcacacacacacacacacacacagagcttcatttcctgtcttaaaatctcgttttctcttcttccttcttttaaatttcatatcctcactccctatccaatttccttcttatcgtgcattcatactctgtaagcccatctgtaacacaacctagatcaaggctttaagagactcactgtgatgcctctatgaaagagaggcattcctagagaaagattgttccaatttgtcatttaatatcaagtttgtatactgcacatgacttacacacaacatagttcctgctcttttaaggttacctaagggttgaaactctaccttctttcataagcacatgtccgtctctgactcaggatcaaaaaccaaaggatggttttaaacacctttgtgaaattgtctttttgccagaagttaaaggctgtctccaagtccctgaactcagcagaaatagaccatgtgaaaactccatgcttggttagcatctccaactccctatgtaaatcaacaacctgcataataaataaaaggcaatcatgttataggagaaaaaaaaaaaaa

SEQ ID NO: 451 - DNA, 1137 bp, Homo sapiens
ttttttttttttgagacagagtctcactgtgtcacccaggctggagtgcagtggcgtagtctcggctcactgcaagctccgcctcccgggttcacgccgttctcctgcctcagcctctctgagaagctgggactacaggcgcccgccaccacgcccggctaatttttttgtatttttagtagagacggggtttcactgtggtctcgatctcctgacctcgtgatccgcccgccttggcctcccaaagtgctgggattacaagcgtgagccaccgcacccggcctgaaaatattttctaaaaagataaaaaatatacataacgatgaaaaataatacaaatttaaaaaccaatacagtataacaactatttacatagtgcttacattgtattaggtgttattaagccaatcttaggagatgattttagcaagtatacagggaggatgtgcctaggttatatgcaaatactgtgccattttatatcaggaacttgagcatctgcagatattggtatcggagggcggtcctgggaaccaagcatccacggatactgaggggtgacatttcatgaagtgtagatcattgtattcagagattgtaaatgaaaaaaatatagaaactatttagttttggtagattttttttctgacaatgtgaccagactgaatttcctcataaagaaaaaatggcgtgccttgtgtctgtgtttctcttttctctgaaaggattaatagatctgaagctttgggccactcagagccttccttgatgctgccagagtcttcttatttagattttctgtcttaaaccattggaagcaaaaccgttttcccatgacattctggccttggacagattctgttgtcctcgacgcgtctctttataaagtggtaaaagcctgaaattcagggcagctctccatgaggtgctgaagggctcttttcataagaagctaaggcactgctgcctgccccaggtgtcccgctcctctcagagtcctccccctaccaggtagtgggtagctccatttcagaatgttaacctccagtgaagagctaatgactggttagaagattgacaaactaaccaaaattttacacacttccggttatgtgtgtgaaaggttataaaaaggaa

SEQ ID NO: 452 - DNA, 2575 bp, Homo sapiens
ttttttttttgttttttgttcctattgttaccctctttattccaaaacaattacacatttcaacttttcaaaagcaacatctgggtaagttaggaatattcacagcttcttacacagtgtcagagaaagagactatctgagctcaccaggtatctgctgtgtgttggggaaactgaaaaacaagcaaaagtataactacaatctggacttttttcttttttaaataaagttttttttttccatttttcttctcatactgtgaattgttcttgactccttttcttgacattcagttttcagaatttccatctttcttctggaactaatgtgctgttctcttgactgcctgctgggccagcatccgattgccagccagaaacgtcacactgcccaagatggccaggtacttcaaggtctggaacatgttgagctgagtccagtagacatacatgagtcccagcatagcagcatgtcccaggtgaaatataatcgtgctaggagcaaaagtgaagttggagacattggcaccaatccggatccacagagcgaagagcagaagcaacggcgagaggatcagggcagtgaatgtattggacaccacggtggggggcctcttctcaggctcgcggaacaggtgctgaatttcctgttttggagtgaaaaggttctgggacaagacagtcgagggagcttcttcctcagggaacttgatgaccacatcagccacattccagaggattgggttcttcaaagtggcatctccaatgattaaagtagaaagtgtaggtgccagagcgggaagtcaaattcaatcctttcctttcagaggtatccagttcaaacttgtacacgttcttgttgtctggctcggcaacaaacaccacttccctggccagtcttctggttatggagtcggacaaatgtctggtgaggagtgagttcagcaccagtgttcacacctacccagctggaagaacaaggcgaagttctggtggctgtctgcgatgaatgtgcccttggctttggcctgggtatgtcacccgggtagtttgggggtgcaatgctctgatccttatcccacggtggaaagatcaacatttgtgatgccaacttcagtgggaggatcttggactctgagctctacggtatttggaaatataccggttgtcacctttcaactttcgaccaaggaagtcattaataaccacttggaaaatttgacggttcatgaaatttagttcaaaaacaatccctacaaggggtgaaggatgtcttctggaggacagtggctcttggaagcaacagatttagcatgttctagtttaacagtggcctgagtcagaggctgagacagaacattggtgacttgcaaccgcaagatagcctgttcatgagtgtcggaagcagagccctcaggcacaaccacaactggcacgtggtagcgattatgcgagagcacagcagctgcagaggcccacgctgaaggcttcggagagggacttcaaagttcttcttgctgaaagatcgcggttcatcagctggatgacctgatccttccttaatggatggcttcagtccccacaatgatccattgagctttgtaggtggcagccacaaactaacgctgttgtttccagtccttcttcaaacttggagatacacgcccccgagttcatccaggcgagcaacaaggtcctcaatctcctccacgatgctcctcaggtcagcctgctgggacaggtgggatgctgtctgcagagcctggactgttgccagcacagtctcctccttgctgagacgagcagtaagggcactgagtgcttcttgggatgccaagggaaggcccaaagcccactttagagctgccaacttgcatggtaagatctggggtaaacagatgaagtccctcaactgaacagctgcccaaaagccagatctttggtcctcatttgaaaatagagatcttcacattcctgagagggccttggctggccctgggccagccgtagaagagggaatcccacattgcctgggatcaaggttagatcttgatgtaggtacatgctttctttgcactctggcacctgagcacccaaggctgctgagtcccacgattggagtagaaggcagattccaaatttgtgaaagggcgatccagcgaggcttttagtctctccacgtcatgcttggtgaggtagtgagtgggcgtcagagcccaaggtgctggctatgattgtcatgggccaacatggaagacacgtgcttgaaacccggcggcgccattcctccgatgcacggtcccgccggagtccgagccgcgggctgacttccgctcgggaaagtggctccaagagcccgccacaggggacgccagggactcgcggcaggctctgcgggccaggatgagttctaagcacaggtcagtgtccgcggccccgctgagcttcgacgcttccagcagccgcggccgggatcccagtcctcccgctcacagggccttgcagttcccgaggacagacccgcctctcccccgcgcccaggcccacttggaaccgaccgtctcgcaacgctggaa

SEQ ID NO: 453 - DNA, 1052 bp, Homo sapiens
  misc_feature (1)...(1052): n = a,t,c or g
ggttctaggggagaacctgcttccttgccttttccagccccaggggtcactggcattcattggcccggactccttcccccaaccccaaagccagcagcaccacatctctctgacccttcatccgttgtcccctctccccccaagccccatgggacagggtctccactcctgagactcatgggattagactaggcctacctggatgatctgggatcctctcccatgtccaggtctctatccctaaccacatcagcaaagtctcttttgccatggaaggtatttgcaggctctgactttgtgtgtattagggcaggacatttttggcggggcagtggtgggggcagggaattattctgcctaccatgccttatacaaaaataaataaatcacaggcttatacctgaaagaattcctgcaaataataaaagaattagagcagctcagttaaataaaaaaaggtatgannnnnnnnnnnnnnnnnnnnnnnnnnnnnnnngcaggggagcaaggtatttatcaaaaagtgctccacttttcacttaccagagaaatgcaaatcagcacccaaaggagtcactgcggcaccctcatctgagcctcagaagttagaaagatggatagcaccagtgtcaaaggtgactgtgggagggagatttgcatacactgctagtaacaatgcgaattgatggaaccaacctggaaaatggcttggcatcaactgttggagaagaagacacacagtcctctaacctgccagtcccacatcagggcctggatatggccgtcatgtgtaccagggagcatggccaggaatctttacagccaaatactcaccatagcaccaaactggaatcagccgacatacccatcaggaagagaatggatgttaaaaaatgcaaggatagccattgggtagaacgccatacagccatgacaattacacagtgacacctacacacaaggagcatgagtctcacaaacatggcagcaaaaggagcctgttcaagagggtatgtgctatggattccattgtagataaagtttttcaaaag

SEQ ID NO: 454 - DNA, 1460 bp, Homo sapiens
  misc_feature (1)...(1460): n = a,t,c or g
cggtccggatatcccgactcgaccatttcgtgggcgttcgatccctagagggaggagcctgtccaaacggacgctaacggcctacctccccctcaggtgctcttacagcctgttccaagtgtggcttaatccgtctccaccaccagatctttctccgtggattcctctgctaagaccgctgccatgccagtgacggtaacccgcaccaccatcacaaccaccacgacgtcatcttcgggcctggggtcccccatgatcgtggggtcccctcgggccctgacacagcccctgggtctccttcgcctgctgcagctggtgtctacctgcgtggccttctcgctggtggctagcgtgggcgcctggacggggtccatgggcaactggtccatgttcacctggtgcttctgcttctccgtgaccctgatcatcctcatcgtggagctgtgcggggctccaggcccgcttccccctgtcttggcgcaacttccccatcaccttcgcctgctatgcggccctcttctgcctctcggcctccatcatctaccccaccacctatgtccagttcctgtcccacggccgttcgcgggaccacgccatcgccgccaccttcttctcctgcatcgcgtgtgtggcttacgccaccgaagtggcctggacccgggcccggcccggcgagatcactggctatatggccaccgtacccgggctgctgaaggtgctggagaccttcgttgcctgcatcatcttcgcgttcatcagcgaccccaacctgtaccagcaccagccggccctggagtggtgcgtggcggtgtacgccatctgcttcatcctagcggccatcgccatcctgctgaacctgggggagtgcaccaacgtgctacccatccccttccccagcttcctgtcggggctggccttgctgtctgtcctcctctatgccaccgcccttgttctctggcccctctaccagttcgatgagaagtatggcggccagcctcggcgctcgagagatgtaagctgcagccgcagccatgcctactacgtgtgtgcctgggaccgccgactggctgtggccatcctgacggccatcaacctactggcgtatgtggctgacctggtgcactctgcccacctggtttttgtcaaggtctaagactctcccaagaggctcccgttccctctccaacctctttgttcttcttgcccgagttttctttatggagtacttctttcctccgcctttcctctgttttcctcttcctgtctcccctccctcccacctttttctttccttcccaattccttgcactctaaccagttcttggatgcatcttcttccttccctttcctcttgctgtttccttcctgtgttgttttgttgcccacatcctgttttcacccctgagctggnnctctttttcttttcnnnnnnnnnnnnnnnnaaaaacggatcccacctg

SEQ ID NO: 455 - DNA, 2442 bp, Homo sapiens
ggctgccagcgtttcatgatcaacatgggagactcccacgtggacaccagctccaccgtgtccgaggcggtggccgaagaagtatctcttttcagcatgacggacatgattctgttttcgctcatcgtgggtctcctaacctactggttcctcttcagaaagaaaaaagaagaagtccccgagttcaccaaaattcagacattgacctcctctgtcagagagagcagctttgtggaaaagatgaagaaaacggggaggaacatcatcgtgttctacggctcccagacggggactgcagaggagtttgccaaccgcctgtccaaggacgcccaccgctacgggatgcgaggcatgtcagcggaccctgaggagtatgacctggccgacctgagcagcctgccggagatcgacaacgccctggtggttttctgcatggccacctacggtgagggagaccccaccgacaatgcccaggacttctacgactggctgcaggagacagacgtggatctctctggggtcaagttcgcggtgtttggtcttgggaacaagacctacgagcacttcaatgccatgggcaagtacgtggacaagcggctggagcagctcggcgcccagcgcatctttgagctggggttgggcgacgacgatgggaacttggaggaggacttcatcacctggcgagagcagttctggccggccgtgtgtgaacactttggggtggaagccactggcgaggagtccagcattcgccagtacgagcttgtggtccacaccgacatagatgcggccaaggtgtacatgggggagatgggccggctgaagagctacgagaaccagaagcccccctttgatgccaagaatccgttcctggctgcagtcaccaccaaccggaagctgaaccagggaaccgagcgccacctcatgcacctggaattggacatctcggactccaaaatcaggtatgaatctggggaccacgttggctgtgtacccagccaacgactctgctctcgtcaaccagctgggcaaaatcctgggtgccgacctggacgtcgtcatgtccctgaacaacctggatgaggagtccaacaagaagcacccattcccgtgccctacgtcctaccgcacggccctcacctactacctggacatcaccaacccgccgcgtaccaacgtgctgtacgagctggcgcagtacgcctcggagccctcggagcaggagctgctgcgcaagatggcctcctcctccggcgagggcaaggagctgtacctgagctgggtggtggaggcccggaggcacatcctggccatcctgcaggactgcccgtccctgcggccccccatcgaccacctgtgtgagctgctgccgcgcctgcaggcccgctactactccatcgcctcatcctccaaggtccaccccaactctgtgcacatctgtgcggtggttgtggagtacgagaccaaggccggccgcatcaacaagggcgtggccaccaactggctgcgggccaaggagcctgtcggggagaacggcggccgtgcgctggtgcccatgttcgtgcgcaagtcccagttccgcctgcccttcaaggccaccacgcctgtcatcatggtgggccccggcaccggggtggcacccttcataggcttcatccaggagcgggcctggctgcgacagcagggcaaggaggtgggggagacgctgctgtactacggctgccgccgctcggatgaggactacctgtaccgggaggagctggcgcagttccacagggacggtgcgctcacccagctcaacgtggccttctcccgggagcagtcccacaaggtctacgtccagcacctgctaaagcaagaccgagagcacctgtggaagttgatcgaaggcggtgcccacatctacgtctgtggggatgcacggaacatggccagggatgtgcagaacaccttctacgacatcgtggctgagctcggggccatggagcacgcgcaggcggtggactacatcaagaaactgatgaccaagggccgctactccctggacgtgtggagctaggggcctgcctgccccacccaccccacagactccggcctgtaatcagctctcctggctccctcccgtagtctcctgggtgtgtttggcttggccttggcatgggcgcaggcccagtgacaaagactcctctgggcctggggtgcatcctcctcagcccccaggccaggtgaggtccaccggcccctggcagcacagcccagggcctgcatgggggcaccgggctccatgcctctggaggcctctggccctcggtggctgcacagaagggctctttctctctgctgagctgggcccagcccctccacgtgatttccagtgagtgtaaataattttaaataacctctggcccttggaataaagttctgttttctgcaaaaaaaaaa

SEQ ID NO: 456 - DNA, 2114 bp, Homo sapiens
atgtcgcggaggctgctgccccgggcggagaagcggcgtcggcggctggagcagaggcagcagccggacgagcagcggaggcggtcgggagcgatggtgaagatggcggcggcgggcggcggaggcggcggtggccgctactacggcggcggcagtgagggcggccgggcccctaagcggctcaagactgacaacgccggcgaccagcacggaggcggcggcggtggcggtggaggagccggggcggcgggcggcggcggcggtggggagaactacgatgacccgcacaaaacccctgcctccccagttgtccacatcaggggcctgattgacggtgtggtggaagcagaccttgtggaggccttgcaggagtttggacccatcagctatgtggtggtaatgcctaaaaagagacaagcactggtggagtttgaagatgtgttgggggcttgcaacgcagtgaactacgcagccgacaaccaaatatacattgctggtcacccagcttttgtcaactactctaccagccagaagatctcccgccctggggactcggatgactcccggagcgtgaacagtgtgcttctctttaccatcctgaaccccatttattcgatcaccacggatgttctttacactatctgtaatccttgtggccctgtccagagaattgtcattttcaggaagaatggagttcaggcgatggtggaatttgactcagttcaaagtgcccagcgggccaaggcctctctcaatggggctgatatctattctggctgttgcactctgaagatcgaatacgcaaagcctacacgcttgaatgtgttcaagaatgatcaggatacttgggactacacaaaccccaatctcagtggacaaggtgaccctggcagcaaccccaacaaacgccagaggcagccccctctcctgggagatcaccccgcagaatatggagggccccacggtgggtaccacagccattaccatgatgagggctacgggccccccccacctcactacgaagggagaaggatgggtccaccagtggggggtcaccgtcggggcccaagtcgctacggcccccagtatgggcaccccccacccccttcccccaccacccgagtatggccctcacgccgacagccctgtgctcatggtctatggcttggatcaatctaagatgaactgtgaccgagtcttcaatgtcttctgcttatatggcaatgtggagaaggtgaaattcatgaaaagcaagccgggggccgccatggtggagatggctgatggctacgctgtagaccgggccattacccacctcaacaacaacttcatgtttgggcagaagctgaatgtctgtgtctccaagcagccagccatcatgcctggtcagtcatacgggttggaagacgggtcttgcagttacaaagacttcagtgaatcccggaacaatcggttctccaccccagagcaggcagccaagaaccgcatccagcaccccagcaacgtgctgcacttcttcaacgccccgctggaggtgaccgaggagaacttctttgagatctgcgatgagctgggagtgaagcggccatcttctgtgaaagtattctcaggcaaaagtgagcgcagctcctctggactgctggagtgggaatccaagagcgatgccctggagactctgggcttcctgaaccattaccagatgaaaaacccaaatggtccatacccttacactctgaagttgtgtttctccactgctcagcacgcctcctaattaggtgcctaggaagagtcccatctgagcaggaagacatttctctttcctttatgccattttttgtttttgttatttgcaaaagatcttggattcccttttttttttttttttttttttttaaatgctaggtttgtagaggcttacttaaccttaatggaaacgctggaaatctgcagggggagggagaggggaactgttatctcccaagattaaccttcacttttaaaaaattattgtacatgtgattttttttttttcctgttcatacatttgggctgcccatgtactcttggcacatttcaataaaattgtttggaaaataaacccagcaaaaaaaaaa

SEQ ID NO: 457 - DNA, 2248 bp, Homo sapiens
ctatccaaagagaacattaagagtaagacccagagccttgacagatgcttcagctctaaaccagaaccaggaaccacatccatcaactgtccagttcatcttccttttcctttctgcaatctgctcctctgattccatttctacttcattactaataggagttttttcttctatatcatcaataaaatctggttcctgattatttgatactgatagtctcagtggagaaagctttctttgtttagtttctgggctcttcattttgttggtcgttccttcacaatccaaagtaatattctgattttgtgtatctttttcttttgaaatatctttgtctttttttccttttttccgtctggtctcataaccactattgatattttccatggattcagaactacgttttagaacagggcactctgggttttctttgaggcatgcacagtccaccttgtacttacaatttccatagtcaaaatcaaaggcaatagtaatttcagttccctttggaatactgtgtatagaataaatataaagatgtatggttccatcttgaatttcatgcctcacctctgcattgggtgtacaagaccgcctgatgaatcgagcctcattcccaaaagtccttgcatcaacacacatttctagcccatggaaatttagagtaggaataacacaaaagggtatgggtcttttaaaagaaatacccatttgcttcaaactgttcttctcaggcataaacttccctctgtattcaatgataagtgcatcagggaggccaatcttttggcagatttaagaattttctttattcttttgtatatggctctctacaggaggtttgaagagcaaattgttggtattcaaatcggatttattcatctcttttttgtcatttccattgcctaatctcagagctattctttgtgcctccctctgaacaccctcactgtactggttgttatttgcttcttcatatcgatccatccatgctttgatctttgtctcccatccaaaatttgaaccatcagatgaaggatcaatctctggagctgaaccctttttacattttgaaatgtgttgttctttctccccgctttttttccttcttttatcattaactttggaaactcttgaagcagttaaagtaattgatgttggagtatgctgaaatgcagtatataattccacaggaacctcatcaccactctcagttgcactggtatcaccatctgacatattttcccttttccggcgttgtagtagcactgccctctctttatccaaattcctaggctgacaacgttcacatagatatgtatcaggaatatgctgcctatcaatccccatgcagtcaatatgttgccaaacgctgcatttgtcacaacagatcatgtatccatcatcatgtgtaaaaccacatatgcacctgggttacatcagtaccataacttccatcctcaggatgtgctgattgtaggtaggcactgggaagtttcatcaaaattagggagtgggtaaatatggcctacttcatttttgctaataaggactgatgggaggagggggagccggggtgttcggaggagggacgagcaccctattatgggtccgcataggggcaaacccattgtaactgtgtgaatgatgtgagctgctggtatataactggtggggataactgttggatttctcaactaccacagggctagcttctacggattctggttctgaacctgcagccatttccaagtatgacgtctctgctgtatcaacccccaatgggatcactatgctcatgacgttcgcctctggtaaattcgattactatggagtcctatgcattggtatccaaaacactggggcatgccagccacagtgctcattgcaaacatctaagtgcatccacaaaccctgtgatgttcacacacgagacacccgaaccccgttatgtgctcgacccccaaggagtctctccgcacctccgcgaacaggcgaccccccgacagcagccactgcggacacaggacccggctccacacaccccctccccaaacagcagcgcgcagcctcttcaccaggaaccgaggagtaggggagggggcagccaggcagtcaacaggaacgcagagacgacggcgaggctgctcggagtgtctatgcccactctgttgccgctcccgaactccggcacggtctccgactcggccccctgcgcccgctcagtgtcactgcctctcgcacgaaa

SEQ ID NO: 458 - DNA, 2248 bp, Homo sapiens; identical to SEQ ID NO: 457

SEQ ID NO: 459 - DNA, 2343 bp, Homo sapiens
  misc_feature (1)...(2343): n = a,t,c or g
ttttttttttttcaaattttcagtagttttattgaaaaatgcctcttttgtttcagaaataaataatataaggcagtgaaattcacaatctgcagttaaaatataaaagcagcaattctatgttcatagtcttgcaaatgttttccaactacttttgataactaagaaatattatattctgaaaaaagttcatactaaatatacaacacaaacatgcaattccctctctgcagaataatctgcaatttggtataaatgttagtgtgtctaaaacaaggaggtttaaggcaatatggaactgtatcccgttgatgcactaacttcatctacatggcttaaggtttgtggttgttaaagagatgtatacgagcattctatgccccggcgtataacagagatagaagaggaagataagtaattgcaatggagttgacgtttccctcctttttggttttaggaggggaattatttgaatcgtggtgtaattgaattgaaaataagtatagcaaaagataaactgcccgctcgaaatacacagcagctctgggttccaggacttaactgcttaacctaagagtttcactgaggctgcccgctgtgctaactaaaggcacacggcatgttctctctttgcagcttttgttaacaaagtattttgcaagcatttcaagggcaaaggcaaaaatgtctacagactgcgtgcttggagctaggcttcctgcagaaacaaggttctctacaatcagaaagggtactcctggatgagcaacgctggaagaaacacctcagaaaagacgtacactgctctatctgacctgtaaatgagaatttcaacacctcccccaagcctcgcggcgcggcgcgtgatctctggttcactgcccgggtccgtggggcagggcgcggccgccagcgccggtggggctcaggaggctcctctgcaggctcgtctgcgccgtagtcctcgtattccgctgtccgctcgggctccaccggcacgatgaagggctcgcgctcaggcaggtaggccccgccctcgggcacgtaaggctctgtccgattcaacattacaattatggcatgatttggaaggcacacacacacacacacacacagcaaaaggtaaatcatcccccgcggtgatggcactccagtcttaatttcataactataaatagataagttacaatgtcccaattatttccagataatttggtgataatcaaataatgaaatggccctttcttaaaaaaaaaccttcaaaaatccagcagtaaacacaatcattgcacaaatacttgggaagggtcagagactgggccaaagaactgtaaacgcagtaactaagtaggattttcgcaaatccccaagtaactgtttatgccttcaaactcctcaattcaaagaacaacttggaaagatgaggaggtgaggggaagtttcattggctcctagaaactgaactcggggggtgaaaagcaactatcaccaggtaatatacagtacatgacatcttctgtggctgtacctcacacaaactgagttacagctggtgggtgaggaacaccagtgactacagcaaaacaggaagaaaaggtgattttaaactttggtttgaaaattgcagttacaaaacccaaatgagaggacacggacaaaaaagtaacaaaaagacagatgccctgaatcagacacatcgctaacaagcaagagatgaggagattccatttggtgttattccggcatagagcaagcggcaggctttgatgcagaagcttattgtagaattgttaagtgattttagtcgacaggatcacatacaaatcatttacaagccacaattagtttattatttacataagacatttctctttaaccaggttaattgtttttcttaaaatggcatagactcctctggttagtagttttattatgcacctctttcaaaactgaggctcctcatggctgtgtgttggaacttttttaaaataatgtttttctacattattactgaaatgcatcaggattataaactgacaccactgcttttgtctcattcaagttagtaaaaagagtctccaccctcctttgtgatgtcgacccggttcgttaaccattatctgtggtgagatttccatacagactcatttcctaataagcacgtgcgcaaacatcttagaaacaggattttcatgtattcaaactgtaagcagcactggcgacttagaaaatgtgttagccggaacctggatagctttgcccgttgtatgggatgctggcacactgagaagaatcacagtatccaggaggacctgggggtcctcgnatacctgagctcgtgcc

SEQ ID NO: 460 - DNA, 423 bp, Homo sapiens
gtgtccctctgggaaaaagcttccagaggaaggagcaggcagtaatttttgctgttctgcagcctccgctggtgatatcgaggcaaacagggtctgcagtggacctccagcaaacaccagcaggcctgcagaagaggggcctgactattataaggaaaactaacaaatagaaagcagtagcctcaacgtcaacaaaaaggacaaccacacaaaaaccccatctgaaggtcaccagcatcaaagaccaaaggtagataaatccctgaagatgaggaaaaagcagcgcaaaaaggctgaaaattccaaaaaccagaatgcctcttctcctccaaaggagcacaactcctcgccagcaaaggaacaaaactgaacagagaatgagtttgatgaattgacagaagtaggcttcagaatgtaggtaat

SEQ ID NO: 461 - DNA, 623 bp, Homo sapiens
  misc_feature (1)...(623): n = a,t,c or g
aacacgcatcatgggtccctgatctatgaaatgaacacaacctctctgaggctggatgatctggaggaagggggcatggagcaaatttgaggctctgattgctgagccagcctcctcccaggcggtttccccaggactctcgtaggaaataaatagccctttcaagattcctcagctgcctcaccccctgcacatgtgcctggggtgtggcctagaagggagtgatgttcttactctggtggtctgtgcttctgaacacaggctacatgcacacactgacaactaccaataaacagacaggggaaggtctttcatctcagccattttctcttccccccgcccccccttagatggagtcttgctctgtcacccaggttggagtgcagtggcacaatcagctcactgcaacccctcctcctaggttcaagcgattgagtagctgagattacagggcatgcattcantatgccggggttttttgttattttttagtaggagatgggggttttaccatgttgggccagggttagttttcaaantcctggacctaggtgatggcacccacnttgggccttcccaaagtgtttnggggnttacagggcntgaggccaccagggncagcc

SEQ ID NO: 462 - DNA, 481 bp, Homo sapiens; identical to SEQ ID NO: 118
  misc_feature (1)...(481): n = a,t,c or g

SEQ ID NO: 463 - DNA, 1325 bp, Homo sapiens
tcccagctggtaacaggttcttctgggctgggcagtaccctgaatttacaaggcgccttcctagtttctcaccctcagcccacggcccagccccaggtctgcctatttggcagtccgggacataggcccaaaaatggccagagacacagtgaatctctggcctcaggcaagagatccatctgagaacgcgtccccagcctgctccagactcacgccgagaaggtcctcgtccggcgagtgggcagtgggcttgggaccacgttgccgcgcagaggggatggtgagcgctcacggctccaaggggtgtccagcagcccgactgaagcttgatgggtggggggctgtggtggtgggggaggctcagatgacatggctgacctggaaagagaagaggctgtcaggggctcgtgccttgcaaggtagggaccctgtgcttacccccatgtccacgtctgacagtccagtatctgaggctcattcctctcgggcacctcagcaccattgtcaccttgtctgggagcacgcctggcagggtcagatgcctactctgggctcctgaagcaaccgtggggccccctcgatcatagctcttcatgaaaatgccacatcctcccccatgaccaggatggcatcggtcccctctgtgtccccagcacaaggcatggatcccggcacatttgggacacatagtatttgtgggagggaaggaggaaggtgagcagaaaacccaaagccaggggccgggcgcagtggctcacacctgcaatcccagcactctgggaggcccaggctggtctcgaactcctggcctcaagagattcacctgccttggcctcctaaattgatgggattacaggcgtgagccagcgtgcccggtcagaatatactccattttcttgatccattcttctgtcagtagacacatgagttgtttccgtatcttggccattatgaataatgcttcagtgaacacgggggtacagatacctctttgagatcctgacttcgtccttttggccatctacccatggattaaagacttaaacacaggacctgaaactgtaaaactcctagaaaaaaaacatagggaaaaagcaatgatattttagatgtgacaccaaaagcacaggcaacaaaagcaaaacaaacaagttggacaacgtcaaactaaaaagtgtctgcacagcaagggaaataatcagaatgaaaaagcaacctacagaggggaagagaatatttgcaaaccatatatctgataaaagggctagtatccaaaatgtataagaaactccaacaactcaatggcaaaaaaaaaaaaagtcgac

SEQ ID NO: 464 - DNA, 1963 bp, Homo sapiens
ttttttttttaataagatatacatatttaatgattcaaggggaggagtgctaatgggagtcgcgtgagtggtccatggggctggggctctgccctagggttgccatggctgtggggacatggatgtggtctttgtcctgtggtccccaactctgggtctttctcaggactgcctcagtctcctccttcccaagagcataacagcgtcgcccacaccccgtggggcctctcacggcttcttggctttcttcacggaagatgagctggaggccgactcccgtcgctttctcgaattgggcgtgaggggtgcgcccaccacatcaatgatggtgtccttggggtcaggaccaagtccgggttcagtcactgccggctcagcagaggccgggcctgggcctgatgctggtgtggcagggccccctagcacaccagcccgggccagtgcctcatgacggtgccgcagcatctgcagctcatactcgcagttggcacaggcctgcttgagctcgtagagcagcaccaggtcgcttcgcagctcattgaacatgtgcaccagctcctccgtaggtgtcgggctcagctccacaccaagctccagcagcatctgttccagggccttgatcttcttctgtcccacagagcttggcagcttcatccgttggctccgcagcgtgacacctgcagacttgaagtctggaaacttgatgcctgcagtctcaggaacagccggcttctcagcctcctttttctggggtagcttctttttgggggccttgcgttccgtgcgccgctgctctgcagtggtgtctgccgctgtgatcagcttctgcaggtcctggctgcgtttctcccgctccttcttccgggcctcaatcttgcgcagctcctgtagcaggtactcctcctctgccacctgctctggggtccggttgtagagacgctcaagctgttccttccgccgtcgttcgtgcccagcatcaaatactggtatcttaaggtctgtgcctggcacagcccgcacgttggcaagcttagcacagatgtggtagtaccgctccttcaggtcttccacagaacgcttcttgaactgctggtggtcataccggtcatggataacaacaaaacgcaggtcaaagcggcggctgaggtcaaagaggtggtcagtttctgccttagtccaagcatcatcgtggagataaagctggtactcctgctccgagtacacaggcacctgcacagtcttattgaacctggcaaaggggtagtccttgccctcctccgctgcacgtcgccagtggaagaacattgctccgtccttgcgggccgggttggtgaatggcatccacttccaaggccgcaccttcttggagcccaacttggccttcactgtacggtatccctggccagtgtcactgggtagcagtgggggtgcatccttcttgtcagagtagagcaaggcatagacttcccggtgcatgccctcgggcctcttgaaagtcagtgtctcagaggacttcttggattttttcttgtccgggttgataatgtccttcttgctgatggtcccagaggctgcatccccttctggacccccgagttctagaatgtcccgtacatccgcgcccgtagccatcgcgcctgagagatgggggagccaccggaggtcaagggtcagtgcctgaagaaggaccaggctcaggtcagggggcggggccaatccagacctaagcggaggcgagttgaaggggcgggccaagaggagaagggtggtccaggtcaggtcggggatctgcctgtgcccctccgcttggatgttcctaacggccccttcagccacctgggccctcgcacttccgcacctgggtccggcagctgcagcccccactaccactcccccacgcgtccgcggacgcgtgggtcgcgccgggaatcagcgccgtcaaacgggctcaaaaccccatttc

SEQ ID NO: 465 - DNA, 1963 bp, Homo sapiens; identical to SEQ ID NO: 464

SEQ ID NO: 466 - DNA, 2537 bp, Homo sapiens
  misc_feature (1)...(2537): n = a,t,c or g
ttcgtgaaaaggctaaggcgtatgtcacctgcctactttaggaatgcttgaggtccggtactgtgggggtctaagggtctggttaaaagtctaaaagcactaagctgggtacgcggacaatacagctaaaatcttccctgtcctctagtggtacgcggatctgacgcctgacgtaattgtgtagacgccattttagccggtcagacaagcactggacgtggcggccattttgttttggacaccgagcaggagctggcggccgctgcagacgaaaggcaggaaagggcaggccgggtgagcagacggatcggccgactagacagccaaccagcaacaacgaactgagctcgcatactaccgcttacgcatctaaccaaccgcccatctagctaacccgagcccctccaccgtcaactcaggttcggccggtccccggcccgcctgccggagccgtggtggcagccccgggaggagcactggcgtctgtttccttcgattctcgggattcgaagatggctgcacagtcagcgccgaaagttgtgctaaaaagcaccaccaagatgtctctaaatgagcgctttactaatatgctgaagaacaaacagccgacgccagtgaatattcgggcttcgatgcagcaacaacagcagctagccagtgccagaaacagaagactggcccagcagatggagaatagaccctctgtccaggcagcattaaaacttaagcagagcttaaagcagcgcctgggtaagagtaacatccaggcacggttaggccgacccataggggccctggccaggggagcaatcggaggacgaggcctacccataatccagagaggcttgcccagaggaggactacgtgggggacgtgccaccagaaccctacttaggggcgggatgtcactccgaggtcaaaacctgctccgaggtggacgagccgtagctccccgaatgggcttaagaagaggtggtgttcgaggtcgtggaggtcctgggagagggggcctagggcgtggagctatgggtcgtggcggaatcggtggtagaggtcggggtatgataggtcggggaagagggggctttggaggccgaggccgaggccgtggacgagggagaggtgcccttgctcgccctgtattgaccaaggagcagctggacaaccaattggatgcatatatgtcgaaaacaaaaggacacctggatgctgagttggatgcctacatggcgcagacagatcccgaaaccaatgattgaagcctgcccatcctcccatgagagactcttgttagtcaacacatctgtaaataaccttgagataacagatgagaagaaatctgattgatgctggatggacctatcacaataggctgtggacttacttgccaccagcttgtgcatttagtgtgttccttttactttttgatactgtgttgtatgaaacccttttgtcctttgatttggttttttgtttttgtttttttaggggggagggggggtttcccctcctttgcccagacttctctttgaacacaaatgcattagccttgtggctagaacaccctcttcctacctctgtctcccctcacttgtcatatgctctgacatgctaacatttcttttgttcatccctgttgcccccacagaaacatcccagaaaaaccggtcagtgttccttcctccctgatccttaggtttctgaaatagggttctgttacatcctcttcgatagcctgtttaaaatgtttagaaggtctggagctcaaaaatgcgttcttccacattgataatttagtaaactgagaacattgacatcactacagggcagcataagaggttgcttacatgtggtagcagctctggtttgattcaagttgctaccatgtacattgacagcacatataccataaccagcgtgttgggttgaattgcactttctacctttgtatgagatttacagactttccttctgggtttgtatcatgaccagaggggtactatagggttggtttatactgcaatatagaggatcagaagccatttgatttggtaggtgtgtcagaagggagaatgatggcagacgaactgctggaagaggtcagaagatagccatgctaaaatgcaattatatcctcatgtttatcccaaactaatcttggacttttccactcattagctttgttttgcccttgtttcccttgaaggtttaagttcaaccatattctgtcaactgttcagtttcagtggaatcttgtatttctggttcattataacaaactgttcgcttaaatccacccaggactctctttatttgaggtgcctcaaaatgccatggctactttaatgatgnnnnnnnnnnnnnnnnnngaaaccaagtttccttcctgtccccaggttgaagggcaggggcgcaattttggttttcaaccctccacttttttggttaaagcaattttcctgcccaacccccccggggggttggaactacagaatggggnnnnnnnnnnnacttatttttggtttttttagaaaaag

SEQ ID NO: 467 - DNA, 1857 bp, Homo sapiens
ttttttttttttagatttctcatagatttatttctgcgtcatattatatatagatatatgcatatatacctttttttttttaatacaatctatatacccttcccttccccaccaaactcacaaaaggagattaaacccttccaggattgccatcaagcttcccgagatggccagggccaagaaagaatcatctctcaacatgttaagaaacggctgccattcttaggctctggggttgaagcagcagcattcccaggacccaagggccagagagaggaaaagaaatgactgtagtgtgacaggattctaggatgaacatgtccagtgactcctggcatggcagactggctcccagaattctcagggtgtgagtaaaggtgggggccctatggctcttcagaggctgctcaataggtcaggggtagggtataggaactggggatcaggcatgcagggatggggtggcagaaaaaacgcctgtgggttatgctccagacagagcgacccccatcagggctacccacctactcaatgacatgtaatgaacagggacagatgctgagctcttaaggaaacaagggagagagcatggcagcggggagcaatggaacacatgaagtcacaaaaaacagaaagtaccaacaaaaacatgacctacatttgactcctccctagagaaggtgtgatctatgtttggggttaggggaggtgaagggtcatgaacctaggattatcagctggccaggggcacagaaggctctctgaggactcctaagaggcaggcaggcagctgggaccccacatccccagggaggaaacgacagttctttcaattcgacttggaccaaatcttggcgctccctcggagccccttgccctttgaggctttcttgctgggctggcgctggttggtgccaggagctggttccctcagctcagtcaggtgttgctcagggtcctgagatgtggctgcggctgctgctgccgtcgtaactttaatggtttttttaaggttggcaacctcactctcaatctgctgcttcaggcccagctgctgctccttgtgttggttggcacggctcacctgctcctcaatgcctgacagcacgacctcacagcccacacaccattcctgcagggttcgggcaatggcactgaggtcctggcgctggatgtcccgcccgatgctgtagtcaacctcgagccgctggttgcgctggtccagggagccacgaagcacgtcagcatacacagcctcaatcacaaggtcttccagctgccgcacattacgcagggcaagagcctccagcaacactgcatatgggatacactttactttagcagccagggtgacaactgagaggtgtcgaagcttattcttctgagcctctgttagtggaggaagattccgggcttcagctaagtagtcagcgtatgtcccataagcaaacactgtgagcagccggaaggtagaggcaaagtcactctcagccagctctctaacattgggcatgtccagcagttctccaaacacgtagacaccaggggcctccagcacctgatggatgagtgtggccagcgctgcccccttggccgacttggctaggagcagaaattgctcctggttctgccctgtcaccttcacttccgcactcatcactgcactgagtgtgggggacttgggctcaggatgtccagagcctgggtcaggctctgcgggccgctacctggaagcttcgacctccagcgcaccgggcggggccgccgctccgtcacctccggcagctgttccaagcctttcctgccacctccctgaagagtcgctctggccactaaacacgaaatcgtcgacccggg

SEQ ID NO: 468 - DNA, 691 bp, Homo sapiens
gcggtggaattcgcgggacccaaccgcggcgaccggacgtgcactcctccagtagcggctgcacgtcgtgccaatggcccgctatgaggaggtgagcgtgtccggcttcgaggagttccaccgggccgtggaacagcacaatggcaagaccattttcgcctactttacgggttctaaggacgccggggggaaaagctggtgccccgactgcgtgcaggctgaaccagtcgtacgagaggggctgaagcacattagtgaaggatgtgtgttcatctactgccaagtaggagaaaagccttattggaaagatccaaataatgacttcagaaaaaacttgaaagtaacagcagtgcctacactacttaagtatggaacacctcaaaaactggtagaatctgagtgtcttcaggccaacctggtggaaatgttgttctctgaagattaagattttaggatggcaatcatgtcttgatgtcctgatttgttctagtatcaataaactgtatacttgctttgaattcatgttagcaataaatgatgttaaaaaaactggcatgtgtctaaacaatagagtgctattaaaatgcccatgaacctttagtttgcctgtaatacatggatatttttaagatataaagaagtcttcagaaatagcagtaaaggctcaaaggaacgtattcttgaaggtgac

SEQ ID NO: 469 - DNA, 332 bp, Homo sapiens
ccagctctcccatttctgtgtataccaaaatccacgcatactcaagttttcaaagtcagtcctgtggaatccacatataacacaaatgggaaaattagtgaggtgtggtgacaagcacctgtagtcccagctacttgtgaggccgaggcaggaggatcgcccgagcccaggaggttgaggctgcagcgagccataactgcaccactacactccagtctgggcaacagagtgagacagaaggttgactttttaatagaatttttctgttcacttgaagatatggtcaggattgtggcatatgaaaattcttcataaaataactatctaatcca

SEQ ID NO: 470 - DNA, 500 bp, Homo sapiens
  misc_feature (1)...(500): n = a,t,c or g
gggacaaaanttttgagttcagatgagcctcggaaaancgcgnngacccacgcgtccgaacgagagagtgggactcattaaattatgagaatcatatttacctaatgcccttcatttacataaatattatactagggggtaccatctcacttctaggaagactagtatatcgctcacacctcatatcctccctactatgcctagaaggaataatactatcgctgttcattatagctactctcataaccctcaacacccactccctcttaaccaatattgggcctattgccatactagtctttgccgcctgcgaagcagcggggggcctatccctactaggctcaatctccaacacatatggcctaaactacgtacataacctaaacctactccaatgctaaaactaatcgtcccaacaattatattactaccactgacatgactttccaagaaacacatattttgaatcaacacagccacccacagcctaattattaagg

SEQ ID NO: 471 - DNA, 3827 bp, Homo sapiens; identical to SEQ ID NO: 363

SEQ ID NO: 472 - DNA, 2531 bp, Homo sapiens
cgcggccgtacttaggtttgctcaaaatggcagcgctggaggaagaattcacgttgtcttcggtagtcctgagcgccgggcctgaaggactcctaggcgtggagcagagcgacaaaacagaccagtttctagtgacagacagcggcaggacagtcatcctctataaggtttctgatcagaaacccttggggagctggtcagtgaaacaaggtcaaattataacatgtccagctgtgtgcaactttcaaactggagagtatgttgttgtacacgataataaggttttaagaatatggaataatgaagatgtaaacctggataaagtatttaaagctacattgtcagcagaagtatataggatactttcagtgcaagggacagaacccttggtgctcttcaaggaaggtgctgttcgtggtttagaggccttgcttgcagacccccagcagaaaattgaaactgttatctctgatgaagaagtgattaaatggacaaagtttttcgtagtattcagacatcctgttttaatttttattactgaaaaacatggaaattactttgcttacgtgcaaatgtttaactcacgtatcttaaccaaatatacactcttacttggacaagacgaaaactctgttataaagagttttactgcatctgtagatcggaaattcatctctttgatgtcattaagctctgatggttgtatatatgaaaccttgataccaatacgtccagctgacccagaaaaaaatcagagcttagttaaatcactgctgctcaaggctgttgtatctggtaacgctcgaaatggagttgcactcactgccctggatcaggatcacgtcgcagtcctaggaagtccactagcagcttctaaggaatgcctctctgtatggaacataaaatttcaaacactacagacttcaaaagagttaccacaagggaccagtggtcaactctggtattatggagaacatttgtttatgctacatggaaaatctctaactgtgattccatacaagtgtgaagtgtcatcattagcaggtgctcttggaaaactcaagcatagtcaagatccaggaactcatgtcgtgtcccattttgtaaactgggagacacctcaaggatgtggacttgggttccagaactcagagcagtcaagaagaattttaaggagacgaaaaattgaagtgagtttacagccagaggttccaccatccaaacaacttttgtcaaccataatgaaagattcagaaaaacacattgaagtagaagtacggaaatttttggctctgaagcagacacctgactttcatactgtcattggggacacagtaacaggacttctggaaaggtgtaaagcagaaccatcattttatccccggaactgtctgatgcagcttatccaaacgcatgtgctttcttacagtttgtgccccgacttaatggagattgccttaaaaaagaaagatgtacagttgttacaactctgtctacagcagttccctgacattcctgaatcagtcacctgtgcttgcttaaaaattttcttgagcattggtgatgacagtcttcaagaaacagatgttaatatggagtcagtttttgactatagtataaattctgtacatgatgagaaaatggaagagcaaactgaaattcttcaaaatggcttcaatcctgaagaagataaatgcaataactgtgatcaagagttaaataaaaagccccaggacgaaacaaaggagagcacttcatgccctgtggtacaaaaaagagcagctctacttaatgcaattcttcattcagcatatagcgagacatttcttctgcctcatttgaaagacatcccagcacagcatatcacgctgtttcttaagtatttgtatttcctgtacctgaagtgtagcgaaaatgctactatgactcttcctggaatacacccacctaccttgaaccagattatggattggatatgtctacttctggatgcaaattttactgttgttgtaatgatgccagaagcaaagaggctactgataaatctttacaagcttgtaaaatctcagatatctgtttattctgagctcaacaagattgaagtaagttttcgggagctacagaaattaaatcaagaaaagaataatagaggattatattcaattgaagtgctggagctcttctgatattatcaattctccttcatagacattttataaagctcttttatgtgaactcttgcttcatccaggcaagaacggtgttttgtttgcgaccatctcagtgtcaagagaaacgtgtcagtgagtacctggaccatcacttaactgatgctccggggtaggactgcaggtttcacatgaacctgttctaggctgtggacattggtgtggagaggttctgcaattttttaaaaatatgtaactgggttgattttaagtaaaattatttgtgtattgataaaagtctaatttcttatcatgtgttttgaattttttcttttaataaaaaatgaccattgaagcagtgaa

SEQ ID NO: 473 - DNA, 548 bp, Homo sapiens
  misc_feature (1)...(548): n = a,t,c or g
gggatggggccnngnnnnaactgtgactgacggtgctgacggtcccgctgctctgaaggcggtgtatgacatggcccgcaagggtgcccgtgatgaaattcagacacananncntgatggtggcctgttctccggaggtggacgatgaagaccttccgctggaaagtgaaacccggtatggatgtggcttcggtcccttctgtaagaaaggtgcgctttggtgatggctattctcagcgagcgcctgccgggctgaatgccaacctgaaaacgtacagcgtgacgctttctgtcccccgtgaggaggccacggtactggagtcgtttctggaagagcacgggggctggaaatcctttctgtggacgccgccttatgagtggcggcagataaaggtgacctgcgcaaaatggtcgtcgcgggtcagtatgctgcgtgttgagttcagcgcagagtttgaacaggtggtgaactgatgcaggatatccggcaggaaacactgaatgaatgcacccgtgcggagcagtcggccagcgtggtgctctgggaa

SEQ ID NO: 474 - DNA, 1587 bp, Homo sapiens
gttgacggctgcgactccattttgtaggccgcttatttgtgtgcatccacggcgattcttcccgcagagttgtgaagcgaaaggcttacaattaaaaggaagaaaaaaaaataaagataattcgggagtacaattgacaaagcgtgtgggtcgctcagcctccagcagtaactgctgatctccagttcttggagggttccggtgagaagaacgcccctactgcggtactgaggaagcggcaggaggagatgcggcccctggacatagacgaggtggaagcgcctgaggaagtggaggtgctggagcccgaggaggatttcgagcagttcctgctcccggtcatcaacgagatgcgcgaggacatcgcgtctcttatacgcgagcacgggcgggcgtacctgcggaccaggagcaagctgtgggagatggacaatatgcttatccagatcaaaacgcaggtggaggcctcggaggagagcgccctcaatcacgtgcagcacccgagtggcgaagccgacgagagagtgtcggagttgtgcgagaaggctgaggagaaagccaaggagattgcgaagatggcagagatgctggtcgagctcgtctggcgaatagagagaagcgagtcttcttgaaggaggagatcggtggttcacagctgaggactgtagtcaactggtaaggatgaactgacaccttgaggaaactgaaacagcttgtcattttctctgttttgtttttgtatgttttttacccccatgtaacagtctcccttatggtcagtgattgatgacctcgatatggatttagattatcaaatgtgtttggttttggaaatataacttttgtcaaagaaatactctcagaagagaaatggggcttaattaagttgtttttgtggtcacgtttattcttgttacttcgctgtgtttttgaaatgttgggcatggcctcgtattttgctgttacctttgtgacctgattgttttttggaacacgtcaagacgtgggatcagaatcttccaactttagaggtgcaatggaagacactacgctacttggttgagcctggtgaagaatgtattaatgagactgctttgcataaaactgggaagaaagagaagacagttggagatggaagatggttttgtatatattttggaactttagttcctctgtgagacgaaagaggagagctatgttttgtgtcacattgtctgatatatattgtgtaacctgtcaggtgagttgatttagacaacatagctgaccttttatgacaaggcagtttgaatagggactattgtaataccctcacacattataggggcatcagagaatggcatggaagagacagtctacagagagctttaagaggccggagaaaggaaaagacattatcagggcctggaaagtctcttccagttcatcagggtagtagacctgtcagattggaggtcaaagtcaaaagtataataagtgttaatttgccttgaaaaacaaagacctaaaaagccttttttaagaaataaattttttgttcacatgaccaaagcccctcctgtgtgtgttaataaaagaatcataaac

SEQ ID NO: 475 - DNA, 2469 bp, Homo sapiens
ttttttttttttgagacagtctcactctgttgcccaggctggagtaaagggcagtggcatgatctcggctcactgcaacctccgcctcctgggctcaagccatcttccttagcctcccaagtagctagaactacaggtgtgtaccaacacgtatggctaatttgttttgttttttttgtgtgtgtggagacagggttttgccatgtttgcccaggttgggctcgaaagccttaggctccagtgaatttgccccacctcagtctccctaagtgctggggattacagacgtgaaccactgggccccagcccaaaccttcaccttctaagggcactgggatgaacagaccgatcggcttgagggtgggcaaaggggtgtgggctaggttataaggaagtggtaccaaataactgtgtgcctgagttccaccgcaagattactaaaagcaggaccagaccagaaactgctaaagaacatggcctgtttgacatgttcatgagtcacctgacccacagcatatatgcttatgactaaaccctccactcctgattctcaagagtgtatcacctgtcagcaaaatgaatagtgggatattttgggccattttaaatgtgaaattttgcctctttaatgttaattcaaaactatatcaatgttttcttgttcccacctctaacccaaggaaaaaagagaaaacatactatgcaaaggaagtttaaacttaagttttccttaagggtcagcccaacaatgactttcagtcaaatggattaaactggaaaatgtttttgtttctgttgtaaacagatcatcctaggcggaaagtttttttttgtttgttttgcttttaaattagtttatttcctaaatcctagtcttccacatttcctagagggccacctgacacaagtccctgtatctgaagtctagcatctcaaggctgatctggaagtgtgctagtatgctccctagtggataacttaatcttttaatacagttccgtcattcccatcttgttttcagaagagaaggtggctacagccaggcataacatatccactgtgtgcatagagggtctcttcacgttgatgcttggcattccatcagctttctctaagtctttgctcaagttcaaccttaaaatgatgttagacaacaggtcccagtcagttccctctattttcacccattttgctcacaagccatattggcccgattagtggtactgtctgactcacgtgtgtgatccaaataaaggtagctgctgaccactgcctggtttgttttgtggactaggggatagagaatccagggttctctcatgaggagttaaacatatttcaagagcaacaggaaaaaaggtacatcaagccatttggaaaccaaaaatttattgctttctccttccaaaagcttttgtgaattttacaaaaaaaaaggatgaaagttcaccaaactgcttagtcccagctaaagcataagagggtgagaacggtacactgcagggccacccagcagcagctgtgcactgatgttaaaactggctcccccagacttgtagtgctgtcttcagggggctgcattccttacacgccacctcttgtgacataggtcattggtcaagccgctggaatgctacagaggtttttttggttttgagaggcttttttttgttttgccttcctactataaaagcgaaattttcagttcatttctgaaaaataaattggtcaataaattcattttgttctgcttctactttacacaaagcttcatattcaacccgatacctttctagctgcattttcttttctgctattagggcttgaagttgctgctgttgagcttctctctgctttgctatagatttgagcaagttccgagcaccgatggccttcatcttttcattttctgcttcttttgcaagttgatcaacaagctcaattaaaccaccaactattttctgaaactggccaattttgtccacaaagtctttgcactcttccttcagctctatggtctgctgggtaacctctgggtccaacaccctcagcttgttcagttcatcaaagtgtagccctgcttcacccaggatgtccttggccatggctgtttcccatccaggttccctagaggagttctgctctgaaggagtgacagtggcagtcaggaggaggtgtgtcataggagcaagggtcaggaaagaataaagtccgcttgcttgtcacaggcatcgttcattcaacacacatttcttgagtgcctactacatgccaacactgctagatgctgggggtacaaagatgaatgcaacacggtgcccgccctgaagagcacatagttcagctgccggccccgcggcggcagcgcgctgcagcccaggctgatgtagacaggcagcttctcctgggtcagcgacagccggtacccagccagcctgccacggccgctgccacggatacagagcctgt

SEQ ID NO: 476 - DNA, 1429 bp, Homo sapiens
  misc_feature (1)...(1429): n = a,t,c or g
aagaggcgtggcggcgctgtgcgcgtgcacaaaagagagctgaggggcgggggcgctgcggcacagctggtttgagcaactgaactggaaacaagatgcaggaccccaacgcagacactgaatggaatgacatcttacgcaaaaagggtatcttaccccccaaggaaagtctgaaagaattggaagaggaggcagaagaggagcagcgcatcctccagcagtcagtggtgaaaacatatgaagatatgactttggaagagctggaggatcatgaagacgagtttaatgaggaggatgaacgtgctattgaaatgtacagacggcggagactggctgagtggaaagcaactaaactgaagaataaatttggagaagttttggagatctcagggaaggattatgttcaagaagttaccaaagctggcgagggcttgtgggtcatcttgcacctttacaaacaaggaattcccctctgtgccctgataaatcagcacctcagtggacttgccaggaagtttcctgatgtcaaatttatcaaagccatttcaacaacctgcatacccaattatcctgataggaatctgcccacgatatttgtttacctggaaggagatatcaaggctcagtttattggtcctctggtgtttggcggcatgaacctgacaagagatgagttggaatggaaactgtctgaatctggagcaattatgacagacctggaggaaaaccctaagaagccgattgaagacgtgttgctgtcctcagtgcggcgctctgtcctcatgaagagggacagcgattccgagggtgactgaggctacagcttctatcacatgccgaactttcttgtgacaaattgtctggattttttaaaaaaggaaaaagcaagaatgaatccttgtggtttttagttttgtataaattatgtttcaaatctttacattttggaaataatcattgctggagattctgttaaatattttggaactcttttttaaattatagtatttcctctaaaaaaaattaaaaccagctattggtatggcacatgggtattttcctcatttatattttaagtaagccataaaacctagtcactattttttgacatataactataaaaagaaatacagttttaaatgtgaataaattatacagtggaaaattgcagactaagccttatagatacattgtttatttttattttataaagagagcagtgagattattaaactacaggaatggtctctaggacaaaagaatgttagtattgaagaaacagacaatttttgtgaaacattcccttattgaagcaataactgaaagtttccagtttactgccatatttggttaaatgtgttttcttgttaaaatagtttatctcagactgttaactaannnnnnnnnnnnnngagagggagcttttttg

SEQ ID NO: 477 - DNA, 414 bp, Homo sapiens
  misc_feature (1)...(414): n = a,t,c or g
gtgcagcaaccaacaagaaaacactggcagattacgcccgtgccttatccggagaggatgaatgacgcgacaggaagaacttgccgctgcccgtgcggcactgcatgacctgatgacaggtaaacgggtggcaacagtacagaaagacggacgaagggtggagtttacggccacttccgtgtctgacctgaaaaaatatattgcagagctggaagtgcagaccggcatgacacagcgacgcangggacctgcaggattttatgtatgaaaacgcccaccattcccacccttctggggccggacggcatgacatcgctgcgcgaatatgccggttatcacggcggtggcagcggatttggagggcagttgcggtcgtggaacccaccgagtgaaagtgtggatgcagccctgttg

SEQ ID NO: 478 - DNA, 936 bp, Homo sapiens
  misc_feature (1)...(936): n = a,t,c or g
taccatcgtggctcgctgcaacctccgcctcccaggagaattgcttgaaccctggaggcggaggttgccgtgagctaacattgcgcccctacactccagcctgccaacagagcaagactccgtctcaaaaataaaaaaaggatctacttttgagaatactgtcattggttgataaaatacagcagaaacttgtgaagaagctattttccatattcacctggcatgtttggagatgattgccatcaactttgtgactgtgaaggagaaaccttctgccacccaaaaactgaaaaatgcctctgcccccgtgggagaactggagccagatgtgatgctggttagtctcctgtattgggcgttcagcatggatgttgcctttttctgacctcaagacaactatccaactttccctgtgtccttcacgatgcaaccactaaagctctactgaagtctctaattctgaagaggcaccttaagaattggaatctaatgacttgcttggaatcatatgctcctaagtggggcagaactcaggttgcccaatcaagaagcacagtcctgacgacagcatgctgcattgttaacgctcccacgaggtggaaatcatagccggaaattttgaaggtataaaattttgtggagccgaaaaagaagagaagagctgtttttagagcgaagcttttcccttggggggtgtttgtgtgccagccgcgttaaagcggtatggacaattggtcccaatagcgtggtgaccctgccgctgtgaatcgagcacccgttctctcatgccggtatggatgcgcgcgtgacctgatcgggtggtggaggatagcgccgggatattcttctcgtcgaccgaataaggtgtgttttctcaaaaaggtgggtggctctggtgtgtgaccattngtggtgacaaacgacgacctaacggtg

SEQ ID NO: 479 - DNA, 1449 bp, Homo sapiens
ttttttttttttgatagtgctttgtctttatttctgatgcccatcttcttcagaggttaagaagaaatgacactgatgtacaaatgactcaccaagggactctcacctgactctacccttgcaggggtggaataaatcccttctattttcaagtctatttgtcccatttctgtttagacataatttgaaagccagcttggaccttgtacttttcaattatgttaacgtaaaatactcgtaacgaatgtagtatgagtttaaagtgagcttttcagatcctataagtgcatcctaagtaatgacaggctttaagataaggaatatatgccttttgttaaggcagaaatttcataaaatttcatgaaaaaccatggtcaatccaatgatgccctttttaagacaagtttgtttggaaactggaagggtcaaaagacaacaaaaaagcccccccccaaaaacctccctttaagcaaatttataacttgaaaaaaaaaaaagcctaagaatattctgagagtggtacatagttttatagtagccacagtaacttccagtgactggcaaatttctttgcatcagctggcatgtgtggtgaatggaattcccatgaacagctcttacatccttccgctttccttctacaggcctcggtcttgtttccaaaggtgactgcagtgaggatgtaaggtccatgacctctagggataatgccatccactcaggaagaaagatgctgagaaactctagggatatctaagtttacatcacagggggagaatcaattgtggaggttttaagaagacatttgaatttttgcccctaatcaagaagtgttttgccatctggtttacattcaataactagttggctcatcatttgcagaaataaactttcctctagattaggaaacttcatcatgagatctgagatatactggtttggaaagtttcctcagtttctcttggcttcgaagtccccggcctcggagtggggtaaggcccattggaggcagatgaattggccttgggtaaggaatcttgtaatgcagtccaatttcaatcctggctgtgcattcatctatacactgtttaattaggtctgtgtccgtgagatttttgtttttccggaacagcgttctggcttcatttagtatgtactgtttttctttgatggtgtcttccatctgccctgatgtcgcctgccatttcctcgcaagcctgaaaatgctgcggtagaggccaaggacttcttgtcgtgttgccgttgtcattctgagtcagtcctgccttcccccacccacagaagcgcgcagcccgcggcgggctgggaggaggcggcgccaggagcccagcagagccgtggccgaccgagcacaggctggtccagtaggccaggccggaccaaaccaccgggcccacctctgtggagcaccagttccctcgtgccgaa

SEQ ID NO: 480 - DNA, 1456 bp, Homo sapiens
  misc_feature (1)...(1456): n = a,t,c or g
ttttttttttttatgagatggaaggttttattagactaggagatttgtgggaggtatgagcgctgggccaaggtggcacgggccatgctcaaggcaccctctcgggtgcggtgaccgccaatgaagccgcttgcatggacgaagatgcagccagggatcccactgacctggtccagggcctcgtcccgaagaccccgccatggctctggcaggggcagccggctttggaatgagtggggctccttgggcacacactgtattcgccactgtccagcctggtcagtgtagataacaaagaagatggccactggaggggacagcccagattccaggtggtagagatgctccttccagggacatgcacctttcgccagttccacaatctctccacttgggtccacctggaatcgctgggcaagggcctcttccaccaaggcccgggctggcagccagctgtgttggtagaaatctaatctctgcagaaactcctcttgaaccagatccattgcacgcttgaaccctgcctcagtgtcttggtcggggtggttccaggtaggattaagtcgagcaactcgtgcactcagggtagtggtcagtgcatatcgaggctccccctctgcccactgggagatcccattgtccacagcatccacctcctccacaaagttctcatacatcttgtcatagagggtgcccaccatgctgtcctcttcactagtgcccagcaactgggccagcagcttgtgcccgaagtgcagatagatgagtcccgcactgctcagcttggtctgccacggcttcccaggggacagggagctcatggtctctgtgaaagacctctggtgatggtcatatcggtgtctccgagggtcgtactcgccccccacgtccaccacgatgtcacaggaagcgagtttttcgggatcccgggtccgcacaatctctgcatcccggtactccggcaggaggcgaagcagtgcgcatgccagtgcctcgtcgcagtggaaggtgccattgtgcgtcccgattcggggcggtgccatgagtttgctgcgggatcgttttgggggcgggacggactctggaccgagcatgcggtgccgggtatacaggggtggcggcggcagcagcagcgttaagaggccgcgcaggaagcggtgtcccataagcagctccctgcagggaggcaggagcgccgacccggaagaggaagcgccagcgcagccccacttccgcttgccaaccgttcccttggcaaccagctctgcagagtgagcagcagcagactcccagcctaggatttcttccagctggtcaaagggccctgcgatggagcctccaagaggcgcatcgcatcacccctgcgcatcangctctgagacggngcccgcactctcgaccacacccccatctcatcacgagtcccttgcttaatccaagaaaagaccaacattct

SEQ ID NO: 481 - DNA, 1652 bp, Homo sapiens
accagaatgcaaaggtgggcagcgaagccatccaggtgctccccgccttcccccgcgaggtccaacgcctgcccgagcctgccaagtcctgccgccagcggcagctggaagccagaaaggcagcagccgagaagaagaagattcagaaggagaagctgagcactccggagaagatcaagcaggaggccctggagctggcgggcattacgtcggacccaggcctgtctttgaagggtggattgtcccagcaaggcctgaagccctccctcaaggtggagccgcagaaccacttcagctccttcaagtacagcggcaacgcggtggtggagagctactcggtgctgggcaactgccggccctccgacccttacagcatgaacagcgtgtactcctaccactcctactatgcacagcccagcctgacctccgtcaatggcttccactccaagtacgctctcccgtcttttagctactatggctttccatccagcaaccccgtcttcccctctcagttcctgggtcctggtgcctgggggcacagtggcagcagtggcagttttgagaagaagccagacctccacgctctgcacaacagcctgagcccggcctacggtggtgctgagtttgccgagctgcccagccaggctgttcccacagacgcccaccaccccactcctcaccaccagcagcctgcgtacccaggccccaaggagtatctgcttcccaaggcccccctactccactcagtgtccagggacccctccccctttgcccagagctccaactgctacaacagatccatcaagcaagagccagtagacccgctgacccaggctgagcctgtgcccagagacgctggcaagatgggcaagacacctctgtccgaggtgtctcagaatggaggacccagtcacctttggggacagtactcaggaggcccaagcatgtcccccaagaggactaacggtgtgggtggcagctggggtgtgttctcgtctggggagagtcctgccatcgtccctgacaagctcagttcctttggggccagctgcctggccccttcccacttcacagatggccagtgggggctgttccccggtgaggggcagcaggcagcttcccactctggaggacggctgcgaggcaaaccgtggagcccctgcaagtttgggaacagcacctcggccttggctgggcccagcctgactgagaagccgtgggcgctgggggcaggggatttcaactcggccctgaaaggtagtcctgggttccaagacaagctgtggaaccccatgaaaggagaggagggcaggattccagccgcaggggccagccagctggtcttctaccagcacaagaacctcaaccagcccaaccacgggctggccctctgggaagccaagatgaagcagctggcggagagggcacgggcacggcaggaggaggctgcccggctgggcctgggccagcaggaggccaagctctacgggaagaagcgcaagtgggggggcactgtggttgctgagccccagcagaaagagaagaagggggtcgtccccacccggcaggcactggctgtgcccacagactcggcggtcaccgtgtcctcctatgcctacacgaaggtcactggcccctacagccgctggatc

SEQ ID NO: 482 - DNA, 652 bp, Homo sapiens
  misc_feature (1)...(652): n = a,t,c or g
gaacctgggaggcggaggttccagagagccaagatcgcaccactgcactccagcctgggcgacagaacggagaccctgtctccaaaggaaaaacaaaaaagaagaataaaataatttggatgcaaatcatgtttatttaaatagtaatgtcatgagactattaaagatgtgccagagtttcaatgaaaatcattaaagtaggacagctaagaaattaatattaatatcaaaattattgataatcttaaattattgattattccttaacgcactccattctccttttacattttatcatgtttcttttgaatatatgaattggcaaaggacttgatgaaactgagtactaagatttggtacagagtatgtcaggaagacaactcagattgccattttaaataaagttgtacatgaacaataattggaatcatcaggtaatttttttaaacaaaggttcttcatttactgttatgattggaaaaaaattagaaaataaagtaagtgccataggctaattaaaaaataaaaccttggccgggcgcggtggcttacgcctataatcccagcactttgggaggccgagacgggcagatcacgnggtcaggagattgagaccatcctggctaacacggtgaaaccccatctgtacttg

SEQ ID NO: 483 - DNA, 416 bp, Homo sapiens
  misc_feature (1)...(416): n = a,t,c or g
caccccttgctcagcctatataccgccatcttcagcaaaccctgatgaaggctacaaaaaaaaaccagaaaaaaaaaaaaaaagaaaaaatataaaaaaaaaaaagggggggggcctttaaaaaattcccggggggggccaaagttaccggcgccgttgcgaagactatttttttcctttttggggggacctttaaaaacgcttcgggaatttttgaaaaaaaccttttttttggggggggaaaaaattggaaaaacccccccccaaaaattaaaccccttggggaaaaaaaaaaattttaagggggaaaggggggaaaaacccccgaatgggggggggggtaaaaagttttggggnnnnnnnnnnaaaacaactttctttttggggggggggatttggaacaacccctcccaaaa

SEQ ID NO: 484 - DNA, 430 bp, Homo sapiens
  misc_feature (1)...(430): n = a,t,c or g
aacctttcagcaggaccaaattgatcaagattaccagaaagtgggctcccttcgtgacagggcaggactgcatcacccaccaccagcaggctgtgcagggcaaggtcctcgcaggggctcaagttgggtatataggcagcttcagtataatatgccttagcaatccacttaaaaaaaaaaaaaaaaaaaaaaaaaaaaaaaaaaaaaaaaaaaannnggggggggggccctttaaaaaaaaaaattttttccgccggggggggggggagttttttttttttttaggggccccaaaaaaaaaattcggggggggggtataaaaaagggggggggggaaaaaacccggggaaaacaaaaaaaaaagggtgggaaaaaaatccctttttggggggggggaaaaaaaaaaaaaaacgnnnnnnnnnnnnngnga

SEQ ID NO: 485 - DNA, 401 bp, Homo sapiens
cccacgcgtccgcggacgcgtggggtgtattttatgtgtggcccagggaagccaaatgattggacatccctgccttagactgaaatgtctgtggtgataaaatttcactgcattaggatgacgacatagtaaaaattcaagcattaattattacctgaagcttctctatttccgtctttgcagcttgcctggctttgccgatggcacagccccaataaccctatttagaaaaaaatatatataatcactgaattagtacactatcatatgtaattaatgactactaatgtttctataacctagtgaaaggatgctaaatgacttttaaaagcaagtatagaaaaatatagtcaaacacattctgatgaatgccaaagggctcaaaaatactaaaataccac

SEQ ID NO: 486 - DNA, 389 bp, Homo sapiens
  misc_feature (1)...(389): n = a,t,c or g
acgagggcgtgactggcggtaacgcancgtatcctatgtttcaggtgcagccggtgcagcacgtgtatcctgcccaggtgcagtacgtggaagggggagacgccgtctacaccaatggagccatgtgcgtgcttctcccgcgggccacacccggaaccctctccctgactccagcctttgccacctggggaggcatcaagcaaattcctctcccttatgcttttggcgatgtgttcactaaatactgttaaaatgctattaggaaactgggcaatatctctacagaaggttttaaaattagccggacatggtgacaagtgcctagagtccctcccaggtaatcggggggccggggtgggaggatcgcatgggcccaggagttggaggct

SEQ ID NO: 487 - DNA, 707 bp, Homo sapiens
catagaccggacggttgtccagacatcggccccacgggagagctgagtggtagcttaaagattcccaaccgggacagcgggatcgacagtccctcctccagtgtggctggagagaactttccctgcgaggagggcttggaggctggcccaagccccactgtactgggggcgcacgcagagatggccctggacagccaggtcccgaaggtcaccccccaggaggaggcggacagcgacgtgggtgaggaacctgactctgaaaacaccccccaaaaggctgacaaggatgccggcctggcccagcactctggcccccagaagcttctccacattgcccaggagctcctgcacaccgaggagacctatgtgaagcggctgcacctgctggaccaggttttctgcaccaggctgacggatgcggggatccctccagaagtcatcatgggcatattctctaacatatcctccatccaccgcttccacgggcagttcctgctgccggagctgaagacgcggatcacggaggagtgggacacaaacccacggctcggggacatcctgcagaagctggccccattcctgaagatgtacggcgagtatgtcaagaactttgaccgagccgtagggctggtgagcacgtggacccagcgctccccactgtttaaagacgtcgtccacagcatccaggtaaggcgtcgacgcggccg

SEQ ID NO: 488 - DNA, 377 bp, Homo sapiens
ttcgccattctgcttgttggccgtcatggtctggtgagaggggtcggcggtgctggggagactgctcaccattttggggtttgccgctttgccttcagagggcttattgtgagtggatgattttcgggaaaagttactctgtttcccagaggttgctgcgtgcgcattcagcagaggcagcagggagctgcagggagttcttgaggaatagttgttctttggatgtggaatttctccgcagagcatgatttgggccttcagctgttcgatgtcacaggaaaaccgggcagctttcccgagctcctcgtcatatttacgctcgctgacaaagtgcttaatttctgccctgagttcggccagctgcatctctgccatct

SEQ ID NO: 489 - DNA, 377 bp, Homo sapiens; identical to SEQ ID NO: 488

SEQ ID NO: 490 - DNA, 1292 bp, Homo sapiens
gcacgctgcagacccttgccccggctacggtgcagacagttgctgcgccacaggtgcagcaggtcccggtaagtggctggaaaggattcagggaggcactggttggggctgttaactggtccttggttgaagatgtggtctttatggctgcggtccagaacccggccctcaccgccctcaccacccctatccagacggctgcccttcaagtaccagtaagagctgccttctcccccaccctcctccctccccctttattcctggaggtgttagtcttcagagatgttaagcaggtacctgggggagtcaagcagcttgagccccccaaagaaggagaaaggcggacaaccccataatatcattgagaaacgaatacgctcctcccatcaatgacaaaatcatcgaattgaaagacctggtcatggggacagacgccaaggtgggtgccaagcaaaattgtgttttatgttccaccatctcccctctacctgtttttgcctcaggagcctagagaagtcccaggctcaaggtaagtgaatacaagaccgagttagaggtgcttttttattaaagcatcttggtgtcatgtcaagattataaaatattaaaaaacataagggactggtgagggttgataaggcagtgacccgctgagacctttgactcctttggctatgctctgcagttgatggggactccactgtcagaggcagagaaagatgcctgccactcagtagttccagatacaggactgtgtgtaccttggagtcagctgatggcatagttttagctgtgtttaggggttaccttttaaggaaaagaaagaaaaaagaggttgagtctttgaccagcaacacatagaggaaactgatgttccaaatgtttctggtgtttcagtgtatgtgtcttctagaaagtaggagattttatttttaaaacctatctatgtttaaaccctattttgaaagaaaatttcattttccttgcctacaaatctgaaagctgtacatcctaagtaaaaatctatgcccaaagtgctgggattacaggcgtgagccaccgcgcccggccgaaagccaactcttatgcctagaaatatgtgcacctatgaccaagcccatgaattatacaggaattatgtaattatgagtgatgtacttcaaagttattgcacatacacttgtttactttgtatgtttgcaggattaaactttgtataatctttttacaaaaattttttttcagtatgcaagcttgcaagatgaaaataaaacctgtttgcctgatagttg

SEQ ID NO: 491 - DNA, 344 bp, Homo sapiens
atccactgctgtgcgggcacacatactcacacaggtaagcggggaaacgtacctatgcctctggcaaaatattctcggcataaatgaaggtcattttcacaggatattaaaattatttccgacaaactctaaggaaaagaaaatgagtttctcagtgaccgaacgctgaatgtgatacagggcaatgacggactcgctggcggactccactctacccaccgagttctgcttgtgctccatgagcttccggaaagatggctgcttggataacacctttcctcctgcacactctacgattgccttcatagtggaaagacttgggcagattccaggtgtgatgtaaa

SEQ ID NO: 492 - DNA, 557 bp, Homo sapiens
  misc_feature (1)...(557): n = a,t,c or g
gggggccngnnaattgagnnaactgacganctgctgcaaacggcacgagccaaataggaacagctctagtctacagctcccagcgtgagcgccgcagaagacgggtgatttctgcatttccatctgaggtaccgggttcatctcactagggagtgccagacactgggcgcaggtcagtgggtgcgcgcaccgtgcgcgagccgaagcagggcgaggcattgcctcgcttgggaagcacaaggggtcagggagttccctttctgagtcaaagaaaggggtgacggacgcacctggaaaatcgggtcactcccacccgaatattgcgcttttcggaccggcttaaaaaacggcgcaccacgagattatatcccgcacatggctcggagggtcctacgcccacggagtctctctgattgctagcacagcagtctgagatcaaactgcaaggtggcagcgaggctgggggaggggcgccctccattgcccaggcttgcttagttaaacaaagcagccaggaagctcgaactgggtggagcccaccacagctcaaggaggcc

SEQ ID NO: 493 - DNA, 409 bp, Homo sapiens
gaggccgagtccgacttttgataactgggacgtgtgcgcaaacatgtttggcaccttctttgacaccgaggaccctggcgagttcaagatgaagtactggggcgtaacctcctttctccagaaaggaaatgatgaccactggatcgtcgacacagactacgacacgtatgccgggcagtactcctgccgcctcctgaacctcgatggcacctgtgctgacagctactccttcgtgttttcccgggaccccaacggcctgcccccagaagcgcaaaaaattgtaaggcagcggcaggaggagctgtgcctggccaggcagtacaggctgatcgtccacaacggttactgcgatggcagatcaaaaagaaaccttttgtagcaatatcaagaatctagtttcatctgagag

SEQ ID NO: 494 - DNA, 355 bp, Homo sapiens
ggcacgagggcagggtggtacagtcgagagtgagccagactccggtgtggggctgtgattgctgagcgacttctggcaagtcactgccccctcctgtggggagatgcatggatgagcttggtatgttctccaaagccccaggtattctggggccacacaggcagtgatgacaggggtacaggcccaggtttcctcctcctgctggagcagctcctgtggtctcaagcacgtaggagattctgactgcttaaaaaacaagtgtgggccgggcgcggtggctcacgcctgtagtcccagcacttttggaggccgaggcgggcagatcatctgaggtcaggagttcgagaccagcctg

SEQ ID NO: 495 - DNA, 249 bp, Homo sapiens
gggcaatgttctgcctgttctgtacggggaaatgcgcgtggggtcacgcgtggtttctcaggagatcagcacggcagacgaaggggacggtggtcaggttgtggtgattggtcgctgatgcaaaatgttttatgtgaaaccgcctgcgggcggttttgtcatttatggagcgtgaggaatgggtaaaggaagcagtaaggggcataccccgcgcgaagcgaaggacaacctgaagtccacgcagttgct

SEQ ID NO: 496 - DNA, 433 bp, Homo sapiens
ggacggaacagaagtccaaaagcaaacagcaccgagtgtcaaggagagcacagcagagagcagaatctcctgaatctagtgcaattgaatccacacagtccacaccacagaaaggacgaggaagaccatcaaaaacgccatcaccatcacaaccaaaaaaaaatgtccgtgtaggacgctccaaacaagcagctactaaggaaaatgattcaagtgaagaagtaaatgtgtttcagggtagctctcctgtcgatgatattccacaggaagaaacagaggaggaggaagtttctacagtaaatgtacggcggcgaagtgctaaaagggaacggcgatgaacaaatgtaattaataactttctctgtgaaagctttggaaaaatctttttttttttttttttttgggccaactttggggtggaaaaaaccttttt

SEQ ID NO: 497 - DNA, 179 bp, Homo sapiens
caattaccggcgtcgcccgcgtcctcctaacgctccttcacaagatggcaaagaggccaaggcaggtgaagcaccaactgagaaccctgctccacccacccagcagagcagtgctgagtaacaccaggctcctcaggcaccttcaccatcggcaggtgacctaaaggtcgacgcggccg

SEQ ID NO: 498 - DNA, 179 bp, Homo sapiens; identical to SEQ ID NO: 497

SEQ ID NO: 499 - DNA, 405 bp, Homo sapiens
ggaagacagagaatgaccacatcaacctgaaagtggccgggcaggacgggtccctggtgcagttcaagatcaagaggcgcacgccgctgagcaagctgatgaaggcctactgcgagaggcagggcttgtcaatgaggcatatcacattgaggttcgacgggcagtcaatcaatgaaactgacactccagcacagctggagatggaggacgaggacaccatcgacgtgttccagcagcagacggagagtgtgccggatagcatcctggcagggcacagtttctagagggcccgtccccagcccgggccgtgcatcctagcattgctgttgaatggtgagcacgtgaccatgccgaccacaaaggtgtctgcggaaactcgaggacattcaccacgatgattgtgct

SEQ ID NO: 500 - DNA, 483 bp, Homo sapiens
  misc_feature (1)...(483): n = a,t,c or g
cgagagagtcctggagaatgtggaacattatcaggaattgaagaaaatggtccaacagtccgaccttggccagtatgtgaccttcttgaggtctttctcagacaaacagaaaatctccctcctccacagctgcacgtgtgtgctttacacaccaagcaatgagcactttggcattgtccctctggaagccatgtacatgcagtgcccagtcattgctgttaattcgggtggacccttggagtccattgaccacagtgtcacagggtttctgtgtgagcctgacccggtgcacttctcagaagcaatagaaaagttcatccgtgaaccttccttaaaagccaccatgggcctggctggaagagccagagtgaaggaaaaattttcccctgaagcatttacagaacagctctaccgatatgttaccaaactggctggataatcagaatgtttntaagatctccattaatgtcattnttatggaan

SEQ ID NO: 501 - DNA, 976 bp, Homo sapiens
aaagctgacttcatgagaccgaggatctcgttcgttgatcgatgctacatattcagcatgttagataatgaggttggagcgaatccacgcggaggtcaccagtgtggaagtgctttaagctgtgacgagggagttcctgcagctcagggagccagtagtgagaaaccccacgaatgcacgaagtgtgggaaagccttgtgctgcagatcggacctcagggtacatcacggggtccacgcgggggagaagtcctctgcgtgcagtgaacgggggagtggtttcagggagaagctttgccctgacaaacagggaactcacacaaaggagaaacccgctagagacagcagaagtggtaaaacgatcttccggaagacacgcctgtgtgtcccgggcacagttcacgccggagcgaagccttacaagtgttgggagtgtgagaaaacctcccacaagtcgcgcctcatcgagcaccttcgctcccacacgggggagaagccctgcggctgcagggaatgcggaaaggcctttttccagaagtcacacctcatcctgcgtcagaggactcacacgggggagaagccctgcggctgcgcggagtgcgggaaagctgctcccaggactcctgcctcctgacccacaggcggactcgcggggaagaaaccgtacgagtgctcggactgcgggaagacctcccggaaggcgaacctcatccgccaccacgggatccacacgagggagaagctgcatgggtgaagagaccgtgggatcgtcacaaagtcacatcacgaggtcgccgaacctctaggagggacatcgccagggaaacagccctcaaccaaaactacgacgccaccctaggcagaggtcccatatcggggtgaaattcggccactttggtggcttaaggaaggcatggtcagctgggcgctgtggctcacgcctgtaatcccagcgctttgggacgccgaggcgagtg

SEQ ID NO: 502 - DNA, 360 bp, Homo sapiens
tcgtttggcctttgccctgcagggatgcggacgcacagagcgaaggtattaacgcctctgcccggtacccgaaaaactgggtgaccaccggcgatccggcgcgtgagttcaccatgattcactcagcaccgctgatgctgctggctgaccctgatgagttcgagtccgtacaactggcgcaatcatggcccttgggggccattgtttctctgtggaggagtccatgtcgaaagatgaactgattgcccgcctccgctcgctgggtgaacaactgaaccgtgatgtcagcctgacggggacgaaagaagaactggcgctccgtgtggcagagctgtaagatgagcctgatgacacgaggcc

SEQ ID NO: 503 - DNA, 502 bp, Homo sapiens
  misc_feature (1)...(502): n = a,t,c or g
agagttgccagactacnccccaactgaaggcgttcngatagcagtaggaanaacccaacanccccgacgaagataccccacgcagaccctttaaagagacctatcgaggatttgaattcaaccttcgccctaaacactgatggtcttctctaaactgattattttagtcagcagttcctctaactttttttcaagcttcttagttccttgcattgggttagaacatgctcctttagcttgaaagagtttgttattatccacctgatgaagcctacttctgtcaatttgtctaaccaattttccatccagttttgttcccttgctggtgaggagttgtaatcctttgcaggagaagagccattctggtttttggaattttcagcctttttgcactagcttttcctcatcttcatggatttatctacctttggtctttgatgctggtgacctttgcatggggtttctgtgtggacgtcctttttgttgatgttgatgcccctcn

SEQ ID NO: 504 - DNA, 423 bp, Homo sapiens
gcggcggcggcggcggcggacatggaacgccaagaggagtctctgtccgcgcggccggccctggagaccgaggggctgcgcttcctgcacaccacggagggctccctgctggccacctatggctggaacatcgtcttcagctgcatccttctctacgtggtctttcagaagctttccgcccggctaagagccttgaggcataggcagctggaccgagctgcggctgctgtggaacctgatgttgatgttaaactacaagaagctttagcagctgctcgactgaaaatgcaagaagaactaaatgcgcaagttgaaaagcataaggaaaaactgaaacaacttgaataagaaaaaaggagacagacgattgaaatgtgggacagcatgcaagatggaaaaagttactaaggaaatgcacagaag

SEQ ID NO: 505 - DNA, 2464 bp, Homo sapiens
  misc_feature (1)...(2464): n = a,t,c or g
cgtggtgcagtccctggagggttctcacgctttggctgtctggacttttaagtttttccgctttttcaggaaggcgaccggcagcctcgggcaggggagacaggactgtatgtcagagaagagacggcgcttggacgccaggaatcctctgaagcaggagactgccctatccaggttacccttcccgaggggaaaccagggtctccttcagaaagctgaggcaggccgggcgcggtggctcacgcctgtaatcccagcactttggaagaccgaggcgggcggatcacctgagcagaagatgactcaagaccggcctctgcttgccgtgcaggaggcgctgaagaagtgcttccccgtggtggaggagcagcagggcctgtggcagagtgccctgcgggactgccagcccctcctgtcctccctcagcaacctggcggaacagctgcaggccgcacagaacctgcggtttgaggatgtgccggcgcttcgggccttcccagatttaaaagagcggctgaggcgtaagcagctggtggctggtgacatcgtcctggacaagctaggggaaaggctagccatcctcctcaaggtgcgagacatggtcagcagccatgtggagcgagtgtttcagatctatgagcaacacgcagacacagttggcattgatgctgtcctgcagccttcagcagtgagcccctctgtggctgacatgttggaatggttgcaggatattgagagacattatcgaaagtcgtacctgaagagaaagtatcttctttcgtctatccagtggggagacttggcaaacatacaagctttgcccaaggcctgggaccgaatttcaaaagacgaacaccatgatcttgtacaagatatcctattgaatgtttccttcttcctggaagagtaaggaagctatgcgtatctggagaccacgggtaccacagttgaagactgacattctgaaccctgatgtttctaaagaaacgtcagtatttcagtctgacatatttgaaacatcagtgccttgaaccttaggactgggtcttggggaggattagcgcctagatgtctgattttggagctgcagcatgccaggccgtggctgagagtatgtgagccatgccttgcccttttctgaggctcagggaagtggatggagctagagagacaacaggaaagacggtgctgaagaacatagtgtctttcctctattgtggacctaaagaggtggggaagcaaggacaagaggcaaagagccacactgcccttggcatcatccaaagcattgtctggttgacaccaggtcctggttttgtgtcttttgtcaatacctgaatccttgacaaaagaaaaagtggttttgatgatttaaagaaataagggtgattttgacagaaaatatattttaaaaattttgaccaattgcaatagttatcctcaagccaatttccagaacctgccaccagggggaggtggtgcagcatgaatcattctgaatgctttgtctttgaagtgttcccctattgctgttaccatctcagaggaagtaactgggcatggtgagactcctaaaatgacaggagtttttttggccaaagctggcatctgacttgccacattcctctgagtctggagtagccgcaggggtgggagaatgccagcccagagtcagtccatcggggttacatttccaaggtctgctgccttcatctatgtaatggccgtgttactttcagatctttcagcttcccagagtgttgtgggaatcttggtcattgaatgtaaagggacttagtaaagggtatagatatttttcaaaaatgaaaataactttttttcttataagtgataagcttttataaagatcataggaaaactagaaaaaatgtaaaatgtagaaaattgtaaaacaaacttcattagagatattttgatagataccttttcagtgtctatttacaaannnnnnnnnnnnnnnnnnnnnnnnnnnnnnnnnnnnnnnnnnnnnnnnnnnnnnnnnnnnnnnnnnnnnnnnnnnnnnnnnnnnnnnnnnnnnnnnnnnnnnnnnnnnnnnnnnnnnnnnnncaattcacaaatttttttaaagaacaaacgtgctatcatcgatacatactgttaggttgtctttttttaaaaaacctaatgtaatttgttcatctttttatatctgtaaatatagctcaacacagttatattctttttgtgaatgtattatatctacaatttaccttttttcttagattttacatgcattttcccaaatctttgtgtttgcctatctgtaaacggtaatacattctgattacaaaaaatgaaaatgttacatagaaatgtaccgttatccatctaccagataactattattaataatgtgtatttatttttccaggaattaaaaaacatctatcatataagtattgcaaataaaacttaaaaagca

SEQ ID NO: 506 - DNA, 314 bp, Homo sapiens
gtgagccgggagtgtgcctctgccgtccagcctgagcaacagagtgagaattccccaggagtgcagaggttctcagaactgcaatactctgagatgaattttgaaagctcaagcaacagtggggatcagcatcaacttggattcgccttttacaagtccacctctcagagaagaaataatggcaaataacttttccttggagagtcataacatatcactgactgaacattctagtatgccagtagaaaacaatatcactttagaaaggccttctaatgtaaatctcacatgccagttcacaacatctggggatt

SEQ ID NO: 507 - DNA, 545 bp, Homo sapiens
  misc_feature (1)...(545): n = a,t,c or g
ataccatagctaacaatttctactataaagttaatataagctagttactttatcctaagtaggaanggacagacnnnnnnnaattgacgccntctttgacggaccttaaaaccggcncgacccacgcggncggacagcttttaaaggaaaaggngtactgagccttctgactatgccttgttttcttttgagatatatattttcacagtcttttctagatatattattgctttaacttaacaaatcttagcaatctctcaatgccttttcacttatttttttccaagttatgattctttttcctcacagccttttttgttccatagcaatgagggtgtccatttgataattttaacaaacaatgtaagtttaaaattgaggctaaggtaacatgaaaaagcagggaatctcaaactttatttcatatatatacacacacacacacacacacacacacacacatacatacatatatatatatatacatatatatacatacacacatacatataattttttttttttggagagggagctccactctc

SEQ ID NO: 508 - DNA, 379 bp, Homo sapiens
  misc_feature (1)...(379): n = a,t,c or g
ngtgtggnnaaactgaancctggtacctcacggaagngccgnggaattcgaacagcattcaaaattccccgtcctgtcagngnnnnccttcgcacccctgcttctctccgaggaggttgagctcttgagcaagttgggacttgggccggggcctggaagaatgattggctgggaggccgcgggagggaggccaggaggcccggaccagttgggaggagtgagcaggccccgggggagggggatgagcgcagtttgctcgctttcctcccctgccggccccctccgcccccacacacactcgggacgtcttcattgaagattcacttacaaaggaatgtttcactaaataaaagaaaaccagaaaaaaaaaaaaaaaaaa

SEQ ID NO: 509 - DNA, 954 bp, Homo sapiens
tttacaggatgatgaaacatggtttcaaacgagttctttcttgttactttttaaaatttcttttttataaattaatattttattgttggatcctcctcctttctctggagctgtgcttggggctactctgacactctgtctcttcatcaccagccaaggaaaggggctttcgggtagggcgtagctgcagggcctccttgaagtacttgggaaggaggaagccatcagtattccctggagtcagaatcaccccattggcagagcggaagaagggtattccatctgccagagccaggggtccatcgatgaacacagctatttcacaacgggaccgcatgccactgatgataccggggtctccaggcagtcctggggccaggtgaatgtgcgtccttccctggcaggacaggcctttgagtaggatggatggccagtgcttccagaatgtaccatggactagcatcgggggcagggcctgcggtgtctccaggggcatcagctccaacttaggtacctgcagggaatggccctggttggcccggatgagaaggccagtgctgggatcccccagctgcagggcgaaccgctgcttcctattggtgtccaccacgcgctgcacatcttcagcagagaagccgcggaactggggcaactgcaggagggtgcccaggggcacgaagccatcagctcccatgggaagccccagcttcaaggccccatggcgcagggcataggacagagccttggacagctgcacgtctcggtcctgttctcggggtctgggagcccttctacccctggaccctgctgcttcctgcctccctcctccagagaagttcatggttaagacccaaggtcacaccgtcagccaggagcgcagggaggccgagccccgcaccccagatcgctggtgcgccccgcagggtggtccgggaggaattccaccacactgac

SEQ ID NO: 510 - DNA, 420 bp, Homo sapiens
cacggcacgcgacttaagctaggatcctctacagcggacgcaatacactctggctatattcaaaacattttctttctcatcacttgaagccttcaagcctggtggtttctcagaagacactgtcctagatttttctccatccttgttttctctggctatacccaaaacagaatcttcctcgtcacttgtacccttcaaggttggtggtttctgagaagacactttcctagatatttctccatccttttttcctctggttatattcgaaaaagaatccttctcatcacttgtagccttcaaggctggttttttccgagaagacactctcctagttttttctccattcttttttcctctggctatattcaaaagagaatctttctcgtctcttgtagccttcaagcctggtggttggtcaaa

SEQ ID NO: 511 - DNA, 1371 bp, Homo sapiens
ttttttttttttctgggagaacaatggctttattcagatgttggtgcctctgcccctctggtgcccccgatccccacaaggggccgcgaggcgggcaggtcacagcaggttgaagtcccctttgtgctgttccagccactggtccagcgtcagggccttggggttgagtctcagggtcagctcgatgtcacggtcgggtctcagggcatagaaacggaacatgttggccaggtcccgggcaccgggaaagccaagcttttcgtagtcctcaggagtcatcttggcatcgtgcacgaccttgcgggtgtgcttggtgagcagggcagcgtactcctcggccgtgtgcctgcaagtgctcagcccgatgttctggccgacgtatttttctggcatcttcaaaaggctgagcaccacaggacccaggtcagacacggacatgccatccatgggaacgtcacctgtgggcaagctcagcaagtagctctttccgtctggggctttctggggcaagaagtgggagaggaggttctcaaaatagcagggcagccgcacactggtcatgggaacgccaatgtcccggaaatattcctccacctcccctttgccgtcaaagtgcgcggcggccaatctccctgccgtcagcttcttgatgttctccaggccgctgtagaccacatagtggaggcccaggcgcctggccagatcagcgagcagcttcccctgcttgacctcctgctcctggctgcagctctcccagtaattggtcacgatgaaggtggcgtaagccccattcagggccagctccatgatgacctggtcatcttggtctccctgcactacttctgcaccttgcagcctcagctcctttgctgccttcttcctagggtttcgggtcaccactcgaaccttgaatgtcccatcttccaggagtgtgcgggccacggagccaccctgggcacctgtgcctccgaaaaccaccaccagtttcttgtccaccatgaggacgagaatgggacgaatccggtccagagatctggcagagcgccgctcacggaagcccagcgtcggaggacccctggctgcagccgccaatcccgacgtgtcggccgaaacccctcctccggcgcagttggctcctcctggatcccgcgggactcggcgtcgtttccgggtttgcccgccccaggcacgtgcacagtgagtttgtgtaaatccagttagaccaaaatgagcgaggtggagagcctcttaaccggatgctacgggtgatgacccgctgagcagagcctgagcctgcaacctccagagatctggggaaagccacatactccgcttcccgcccccctcgtgccaagcagggcgtaagcaggt

SEQ ID NO: 512 - DNA, 2620 bp, Homo sapiens
ggcacgaggcgcagctggacccagcagccgctgtctccagtgccgcagcagcaggtagtgctcatagctctctttgtccagtgcttcggccttggtcccagcgccttcccacggagcagcactcttcaccctgcacagccttgttagcccaacagcatggtggtggaacaccccgagttcctcaaggcagggaaggagcctggcctgcagatctggcgtgtggagaagttcgatctggtgcccgtgcccaccaacctttatggagacttcttcacgggcgacgcctacgtcatcctgaagacagtgcagctgaggaacggaaatctgcagtatgacctccactactggctgggcaatgagtgcagccaggatgagagcggggcggccgccatctttaccgtgcagctggatgactacctgaacggccgggccgtgcagcaccgtgaggtccagggcttcgagtcggccaccttcctaggctacttcaagtctggcctgaagtacaagaaaggaggtgtggcatcaggattcaagcacgtggtacccaacgaggtggtggtgcagagactcttccaggtcaaagggcggcgtgtggtccgtgccaccgaggtacctgtgtcctgggagagcttcaacaatggcgactgcttcatcctggacctgggcaacaacatccaccagtggtgtggttccaacagcaatcggtatgaaagactgaaggccacacaggtgtccaagggcatccgggacaacgagcggagtggccgggcccgagtgcacgtgtctgaggagggcactgagcccgaggcgatgctccaggtgctgggccccaagccggctctgcctgcaggtaccgaggacaccgccaaggaggatgcggccaaccgcaagctggccaagctctacaaggtctccaatggtgcagggaccatgtccgtctccctcgtggctgatgagaaccccttcgcccagggggccctgaagtcagaggactgcttcatcctggaccacggcaaagatgggaaaatctttgtctggaaaggcaagcaggcaaacacggaggagaggaaggctgccctcaaaacagcctctgacttcatcaccaagatggactaccccaagcagactcaggtctcggtccttcctgagggcggtgagaccccactgttcaagcagttcttcaagaactggcgggacccagaccagacagatggcctgggcttgtcctacctttccagccatatcgccaacgtggagcgggtgcccttcgacgccgccaccctgcacacctccactgccatggccgcccagcacggcatggatgacgatggcacaggccagaaacagatctggagaatcgaaggttccaacaaggtgcccgtggaccctgccacatatggacagttctatggaggcgacagctacatcattctgtacaactaccgccatggtggccgccaggggcagataatctataactggcagggtgcccagtctacccaggatgaggtcgctgcatctgccatcctgactgctcagctggatgaggagctgggaggtacccctgtccagagccgtgtggtccaaggcaaggagcccgcccacctcatgagcctgtttggtgggaagcccatgatcatctacaagggcggcacctcccgcgagggcgggcagacagcccctgccagcacccgcctcttccaggtccgcgccaacagcgctggagccacccgggctgttgaggtattgcctaaggctggtgcactgaactccaacgatgcctttgttctgaaaaccccctcagccgcctacctgtgggtgggtacaggagccagcgaggcagagaagacgggggcccaggagctgctcagggtgctgcgggcccaacctgtgcaggtggcagaaggcagcgagccagatggcttctgggaggccctgggcgggaaggctgcctaccgcacatccccacggctgaaggacaagaagatggatgcccatcctcctcgcctctttgcctgctccaacaagattggacgttttgtgatcgaagaggttcctggtgagctcatgcaggaagacctggcaacggatgacgtcatgcttctggacacctgggaccaggtctttgtctgggttggaaaggattctcaagaagaagaaaagacagaagccttgacttctgctaagcggtacatcgagacggacccagccaatcgggatcggcggacgcccatcaccgtggtgaagcaaggctttgagcctccctcctttgtgggctggttccttggctgggatgatgattacctggtctgtgggaccccttggaacagggcccatggctggagctgggctgccttaggaggggcagggcccccccatgtccccggtcaagggccttttggaactgtccttccctcaaagaggccttagagcgagcagagcagctttgctatgagtgtgtgtgtgtgtgtgtgtgtgttgtttcttttttttttttttttacagtatccaaaaatagccctgcaaaaattcagagtccttgcaaaattgtctaaaatgtcagtgtttgggaaattaaatccaataaaaacattttgaagtgtgtactctaaaaaaaaaa

SEQ ID NO: 513 - DNA, 876 bp, Homo sapiens
ggaaaatgttacatcacatttttttctatatagcagagtttatgatagaacttttaagggggagctcttttatgtaatgctggctattccgaagttcgcaaagtgctgaggccacggtgagcagtcttaacagtggattgtctgcctagatacgttcccagcggagaacttaatgtaacctactttcgtgcagctccgtgtgttaggatgatttttccctttattaggaattcattattttattattcatttaattgccttcttagttccctgggatcccctccttggagctaggagaatgaactttcttcagggagctctaccaaagaaagaagaccactgtgtcttctcttaatttgaaattgctttttggtattttcaccagcccggagtactgtaggagagttcgcttccatgtcttctgaggaatgcatctaaatgcatgtggtattcctatttccattaactctgtgtgtggtgtcgctgtaggagcgtcaggaagcagagaaaatgttcaagggcaaacggggtgcacagcttgcaaaggatattgccaggagaagcaaaacgtaagacacggatatccaacttaactctacttcaccttcagaaacatgatctgatctgtctggcagttcgtctcctacaaaattaaccaaaaactctgacatattaatgtggtattaaatttgagtgcttatagtccatgtacatcaatggtccacacatcacaagaaatttctaccagcttagcagagcaaatatttcagtagtcagtcttcatgtgataccatgtacatcctattttctatataggaagatgaactggatggtgtttctgaaggagagagttcttgtatcagtttgttaacaaag

SEQ ID NO: 514 - DNA, 2482 bp, Homo sapiens
atgaactacaggtaaaatctagaagaacatagataataaaaaatttctgatttaacagacatagtaaatataaatgaattaactcacacaacctacttacaccaaacaaaactagaatgaacaacttgtaggaaccacctctagttgatttcaccacttaacaggggcaagatcttaggtggatcattttgtttaaggatgacttgaaattttacaatactaccttagctcccacatatgaaaactcttcaagaattttttctcatcaaccagacgttgaggaaaatacagtgagaaataaaatgaaacggcttctcacacatatgaaggcccagatcacccctaaatttctagtgatttaacttaagaagctccttgccctgagagattcctttatcccacaacactctactcagagggggcagagaatcccaggacactacacaagccacaggataaaaacacaacctgtcttctatctggcaccaactgactaatatctaggtatacacaggactgactttaaagttggttaacaaatattttaattcattaaaataaaacttaaaaattacatgcttagtctacacaagtttaacttactttagtcacttagtgaattgtgaattggctcccattagtggtcaggagaatgtatttggtgtagaaaccaaataaatcaagctattatcgccgccgtgagtacaaaacaatgtttatttgtttgtaaagtgccaggtttatatttaagtaaacattaaaatctgcgttgaagcagtgaggctgcatcttttaactggctgtgctggttaaaggactgtttaatcccgctgtgctaagctcactaaagggtcacccctcacttttaaagccaagactgccattgtcactgctatggtaagtccacaagcccaacccaggccttctgggcaaaaggtgaatactaccagcactataaacagacaggactggttgtgaggtagctacacagttttaaagatgctgttaatgaacattacggacaattcatggtgtggctagttggtaacacttcagctgatttttcttatgagatggaaaaaaaaaatcagccaagtaagggcacatcttcagttcatttagaagtcagcatccaaggtaaaagaattctctgttggacttgacatcactcccatcctctgatactcgcctactctcttctcaaagaagttagtctttccttccagtgaaatattctccataaagtcaaatgggttctctactctgaaaaccttgctaaaacccagttccagcataagtctgtctgccacaaactcaatgtattgcttcattagagtgcaattcatcccaatgagcttcacaggcaaggcctcagtgaggaactcctgttctatccgaacagcattgataattatttctcttactctctcctccgatggtttgtgtaccaggtgtttgaacatcaggcaagcaaaatcacagtgtaaaccctcatctctgctaataagttcattagaaaatgtgaggccaggcatcagtcctcgtttcttgagccagaatatcgacgcaaaagaaccggaaaagaaaatgccttccactgcagcaaaggctacaacacgttcaccataggtagcctctttgtccccaatccagcgcaaggcccagtctgccttcttcttgacacaaggcatcgtttcaatggcattgaagagaaattccctttctttgggatcttttatgtaagtgtcaataagaagactatacatttcagaatgtatgttttccatggcaatttggaagccatagaaacagcgggcttctgtaatctgaacttcttggctaaatcgctccaccaagttttcatttactatgccatcgcttgctgcaaagaaagccagaacatgggatataaaatatctctcctcgggtttcagggattcccagtgctgaatgtccttggagaggtcaacctcctcggcggtccaaaaggaagcctctgccttcttatacatctgccagatatcatggtactcgatggggaagatgacaaagcggcgggggttttctctcagcagcggctcatcctccacgccgggggcagctgctttagttttcggctccgtgggctcctggaagatcctcctcgcggtcttgctggccaggacgcgggtcccgctcagggccggcggcgtgttctccttgtcgaccaagctgagccccttcagcggcgagagctgcagctgctgcgggtccgtgatgggcgcgagcgggacacggagggagagcatagtggaggcgcagcgaagcagagcgagcagccaggacaggacggctgggacagggtgcacgggcgacccctcactccagcagcctttaaatctcccgcgccgcgcgctcccggcccttcccattggctttggtgccccggcccttcccattggctgtgccatgcctccgacccttcccattggctgcgcctggg

SEQ ID NO: 515 - DNA, 930 bp, Homo sapiens
gcacgagcgcgagttggactgtgaagaaacatggcggccgcgacgttgacttcgaaattgtactccctgctgttccgcaggacctccaccttcgccctcaccatcatcgtgggcgtcatgttcttcgagcgcgccttcgatcaaggcgcggacgctatctacgaccacgtcaacgaggggaagctgtggaaacacatcaagcacaagtatgagaacaagtagttccttggaggcccccatccaggccagaaggaccaggtccacccagcagctgtttgcccagagctggagcctcagcttgaagatgatgctcaaggtactcttcatggaccaccattcgctgttggcaagaaacggctttacttacaaaacagactctttaccttctgctgtgtttgaagtatgtttagtcagcatgctcaggaaataaatgtgaattgcccttgagacctgcttctacattggttgctttgttaactctacctgatcttcacttgtcagtaatttgagaccacttcaaagccctctgcaaacaccccaaaggcagaatctgctattttgagttttccattaacttccaaagaattctggttttcaaaacaggagccagagttggagatattacagtcaactttggcttctaagccagtaattccattcttaaatacctcactgtcttggccatggggaagcactatggcctcagctgggggaaagaccctggcctaggggtcttagccactccccaccctagggtatagttcaggggtatccaatcctttggcttccctgggccatgttggaagaattgtcttgggccacacataaaatacagtaaccatagctgatgagctaaaacaaaaaacaatggtttgtgcaaaaatctcataatgttttaataaagttgaagaatttgaaaaaaaaaaaaaa

SEQ ID NO: 516 - DNA, 3083 bp, Homo sapiens
cagtggcggaattctagccaccggtgtctccttctacatccgcctctgcgccggctgccacccgcgctccctccgccgccgccgccttgctgctgctcaaagctgctgccgccccttgggctaaaaggttttcaaatggaacattttgatgcatcacttagtacctatttcaaggcattgctaggccctcgagatactagagtaaaaggatggtttcttctggacaattatatacccacatttatctgctctgtcatatatttactaattgtatggctgggaccaaaatacatgaggaataaacagccattctcttgccgggggattttagtggtgtataaccttggactcacactgctgtctctgtatatgttctgtgagttagtaacaggagtatgggaaggcaaatacaacttcttctgtcagggcacacgcaccgcaggagaatcagatatgaagattatccgtgtcctctggtggtactacttctccaaactcatagaatttatggacactttcttcttcatcctgcgcaagaacaaccaccagatcacggtcctgcacgtctaccaccatgcctcgatgctgaacatctggtggtttgtgatgaactgggtcccctgcggccactcttattttggtgccacacttaatagcttcatccacgtcctcatgtactcttactatggtttgtcgtcagtcccttccatgcgtccatacctctggtggaagaagtacatcactcaggggcagctgcttcagtttgtgctgacaatcatccagaccagctgcggggtcatctggccgtgcacattccctcttggttggttgtatttccagattggatacatgatttccctgattgctctcttcacaaacttctacattcagacctacaacaagaaaggggcctcccgaaggaaagaccacctgaaggaccaccagaatgggtccatggctgctgtgaatggacacaccaacagcttttcacccctggaaaacaatgtgaagccaaggaagctgcggaaggattgaagtcaaagaattgaaaccctccaaaccacgtcatctgattgtaagcacaatatgagttgtgccccaatgctcgttaacagctgctgtaactagtctggcctacaatagtgtgattcatgtaggacttctttcatcaattcaaaacccctagaaaacgtatacagattatataagtagggataagatttctaacatttctgggctctctgacccctgcgctagactgtggaaagggagtattattatagtatacaacactgctgttgccttattagttataacatgataggtgctgaattgtgattcacaatttaaaaacactgtaatccaaacttttttttttaactgtagatcatgcatgtgattgtaaatgtaaatttgtacaatgttgttatggtagagaaacacacatgccttaaaatttaaaaagcagggcccaaagcttattagtttaaattagggtatgtttccaagtttgtatttaagtttgtaatagctctgctttagaaaaaataaaaagaccatgatttatgaaactaatgtgacataatttccagtgacttgttgatgtgaaatcagacacggcaccttcagttttgtactattggctttgaatcaagcaggctcaaatctagtggaacagtcagtttaactttttaacagatcttatttttttattttgagtgccactattaatgtaaaaaggggggggctctacagcagtcgtgatgaaacttaaatatatattctttgtcctcgagattttaggaagggtgtagggtgagtaggccatttttaatttctgaagtgctaagtgtttttatacagcaaacaaaaagtcaattttgctttccaccagtgcgagagaggatgtatacttttcaagagagatgattgcctatttaccgtttgacagagtcccgtagatgagcaatggggaactggttgccagggtctaaatttggattgatttatgcactgttatctgttttgacacagatttccttgtaaaatgtgcctagtttaccaaaattaacaaagggggggaaaggaccttagaactttttaaggtaaaatcaaatatagctacagcataagagaatcgagaaatttgatagaggtaacttgtttaatgtaaatctaatagtacttgtaatttctttctgcttagaatctaaagatgtgtttagaacctcttgtttaaaaataatagactgcttatcataaaatcacatctcacacatttgaggcagtggtcaaacaggtaaagcctatgatgtgtgtcattttaaagtgtcggaatttagcctctgaataccttctccattgggggaaagatattcttggaaccactcatgacatatcttagaaggtcattgacaatgtataaactaattgttggtttgatatttatgtaaatatcagtttaccatgctttaattttgcacattcgtactatagggagcctattggttctctattagtcttgtgggttttctgtttgaaaaggagtcatggcatctgtttacatttaccttatcaaacctagaatgtgtatatttataaatgtatgtcttcattgctaggtactaatttgcagatgtctttacatatttcaatacagaaactataacattcaatagtgtgctgtcaaagtgtgcttagctcacctggatatacctacattgttaaatgtctaaacagtaatcattaaaacatggtaaactgatatttatgtaaatatcagtttaccatgctttaattttgcacattcgtactatagggagcctattggttctctattagtcttgtgggttttctgtttgaaaaggagtcatggcatctgtttacatttaccttatcaaacctagaatgtgtatatttataaatgtatgtcttcattgctaggtactaatttgcagatgtctttacatatttcaatacagaaactataacattcaatagtgtgctgtcaaagtgtgcttagctcacctggatatacctacattgttaaatgtctaaacagtaatcattaaaacatttttgat

SEQ ID NO: 517 - protein, 106 aa, Homo sapiens
  misc_feature (1)...(106): Xaa = any amino acid or nothing
LKIPMQFLHSGFWFSFFVFFGFXKFGFGPQGGRQGGNKTKGEKLPPGKKKIPGPNPQENREKKGPPKTLKKFGNLKKKGGKTRGPRGEKNSDPKGTPGQNPGNKKK

SEQ ID NO: 518 - protein, 107 aa, Homo sapiens
VVVAPVVVGSGRAPRHPAPAAMHSRRPDGFDGLGYRGGARDEQGFGGAFPARSFITGSDLGHWVTTLTDIPGRRNLHWGVKSPPYGVPTNCTPYEGPTEDPFDSGSG

SEQ ID NO: 519 - protein, 89 aa, Homo sapiens
DGFPLSFYNTPKSPTSEILFPLSEILFSGPFGWLAAPSCFGFSCHFLKKGFLGPGTVAHSCNPSTLGGRGGWITRGQEIKTILANTVKP

SEQ ID NO: 520 - protein, 132 aa, Homo sapiens
GPLRVDTWSNVESLACAQREEEEENERKKLPGTASPEKKQELVDEPAVGESKEEKIELKSITADGESPPASKINMDALQPNENEDKSPYPTPESTGEEDEEEPEMPVGPRPRPLSELHLKEKTVPMPEASAC

SEQ ID NO: 521 - protein, 150 aa, Homo sapiens
  misc_feature (1)...(150): Xaa = any amino acid or nothing
KINTELQTEVAMLKSMVLWLGEQVQSLQLQQQLRHHFNHIHICVTNSEYNQSEYPWDLVKAHLQGAFTSNITFDTGEFQNTIIDSTKXPHDLXASLDDCSXIXDGLSILASVLMLAAPVLALQTPSWMLFMALPVSLSRLKAYFLVSVLS

SEQ ID NO: 522 - protein, 65 aa, Homo sapiens
  misc_feature (1)...(65): Xaa = any amino acid or nothing
IFWVGKNALHEDEXNTERRTDDIPVWDHEFLKVDQGTLFELILAANYLYIRGWLDVTCKTGANMI

SEQ ID NO: 523 - protein, 147 aa, Homo sapiens
  misc_feature (1)...(147): Xaa = any amino acid or nothing
YARSAIGLLVFQSLMLVAAGDQFLFRPXGEXRQPRXXLKMTKHPPNRRGISFEVGAQLEARDRLKNWYPAHIEDIDYEEGKVLIHFKRWNHRYDEWFCWDSPYLRPLEKIQLRKEGLHEEDGSSVSNKSGKFCSMQGQPLGCLCFNL

SEQ ID NO: 524 - protein, 103 aa, Homo sapiens
  misc_feature (1)...(103): Xaa = any amino acid or nothing
KLFLGFPILHGSSSPPXLKVPSLTHKVSALVSSNSFXVMYLVIFHMNMKVAWRRGSLLHSFQLGFYKSQHFGRPRWADRLRLGVRDQPGQHGETPSLLVQKKI

SEQ ID NO: 525 - protein, 66 aa, Homo sapiens
  misc_feature (1)...(66): Xaa = any amino acid or nothing
GPKPFSLGHKGKSCVKKNFFFFFGGSHLXMQLLRRLRWEDQLSSGGRGCSGPXLHHCTVAWATEQD

SEQ ID NO: 526 - protein, 201 aa, Homo sapiens
VFTGNYNSKMRIWVGTQPNHISAHPHWVMVISVSSRNALIDMPRNPCLTSCVCLSIQSSRRLRLTIRIFMPDSWLKSCLTSYVCLSIQSSRCLRLTIRIFMPDSWLKSCLTSYVCLSIQSSRRLQLTIRIFMPDSWLKSCLTSYVCLSIQSSRCLQLTIRIFMPDSWLKSCLTSYVCLLIQSSRCLKLTVRIFMPLVPRLA

SEQ ID NO: 527 - protein, 203 aa, Homo sapiens
SRMTKKRKRQHDFQKVKLKVGKKKPKLQNATPTNFKTKTIHLPEQLKEDGTLPTNNRKLNIKDLLSQMHHYNAGVKQRALLGLKDLLSQYPFIIDAHLLNILSEVTAVFTDKDANVRLAAVQLLQFLAPKIRAEQISPFFPLVSAHLSSAMTHITEGIQEDSLKVLDILLEQYPALITGRSSILLKNFVELISHQQLSKGLDK

SEQ ID NO: 528 - protein, 84 aa, Homo sapiens
WLPGEMAVEPPADRLQEPLTFRDGAEDFTQEEWGQLDPTQRILYRDVMLETFDHLLSIGPELTKPEDISQLEQGTDLWVAETLT

SEQ ID NO: 529 - protein, 134 aa, Homo sapiens
  misc_feature (1)...(134): Xaa = any amino acid or nothing
AVGGSSRSHGYRRPAGTRPVSHAQDPSAPPPASRLPCIEARGGQXSLPSLILQPGGAGWGILLPNSVLPPAPCTPQSHVSLPSAGPCAPLGGRRQAPLGPRAAEPCRVRGCGAAALSCALPALGRGTFGWKTGI

SEQ ID NO: 530 - protein, 357 aa, Homo sapiens
  misc_feature (1)...(357): Xaa = any amino acid or nothing
VRCTLSPACQTPPQGPHRSSGPVLSSPCPAPVGEWLPPNGPXSDDELPLSQQCKCRTKSLAPPSSAXGSXHRTXLPGTGHXCGLARIESSAGVLEEASAAKXGSGEAPGSKQHSSSPAATSAPSAGSWHPGTAAAHPPGSSASFHTFAAFTVSLSASELGSXXQSRVKHFFLSCSSTSCCSRALIHTKSSESGMSSRRSAFSSPSSGGISLSWLGPKSRISSVTSSRCSRVSXNFLSSEVTFVSVSSHSSPQATLEXLCVKSQTSTMLSYAVELPSMPEPAPLLGXGLSHSHPHAVRDSGEACXSMGSVTGPLYSGYKEEVVCCTLVEVFPSLLQVSRNPRMPFDFLGILICTPWGS

SEQ ID NO: 531 - protein, 77 aa, Homo sapiens
  misc_feature (1)...(77): Xaa = any amino acid or nothing
CAKNECQGGQVESGSFXAIYLXTVIYLCVYLSVCLSIYLSVYLSIYLSIYLSIYLSIYPSIHPSIQLASIXSIFLWG

SEQ ID NO: 532 - protein, 283 aa, Homo sapiens
RKMAGSPELVVLDPPWDKELAAGTESQALVSATPREDFRVRCTSKRAVTEMLQLCGRFVQKLGDALPEEIREPALRDAQWTFESAVQENISINGQAWQEASDNCFMDSDIKVLEDQFDEIIVDIATKRKQYPRKILECVIKTIKAKQEILKQYHPVVHPLDLKYDPDPAPHMENLKCRGETVAKEISEAMKSLPALIEQGEGFSQVLRMQPVIHLQRIHQEVFSSCHRKPDAKPENFITQIETTPTETASRKTSDVVLKRKQTKDCPQRKWYPLRPKKINLDT

SEQ ID NO: 533 - protein, 227 aa, Homo sapiens
DCKNRNCSKGDSVPMHQQKRQPELVEGNLPVFVFPTELIFYADDQSTHKQVLTLYNPYEFALKFKVLCTTPNKYVVVDAAGAVKPQCCVDIVIRHRDVRSCHYGVIDKFRLQVSEQSQRKALGRKEVVATLLPSAKEQQKEEEEKRLKEHLTESLFFEQSFQPENRAVSSGPSLLTVFLGVVCIAALMLPTLGDVESLVPLYLHLSVNQKLVAAYILGLITMAILRT

SEQ ID NO: 534 - protein, 475 aa, Homo sapiens
SMISFCPDCGKSIQAAFKFCPYCGNSLPVEEHVGSQTFVNPHVSSFQGSKRGLNSSFETSPKKVKWSSTVTSPRLSLFSDGDSSESEDTLSSSERSKGSGSRPPTPKSSPQKTRKSPQVTRGSPQKTSCSPQKTRQSPQTLKRSRVTTSLEALPTGTVLTDKSGRQWKLKSFQTRDNQGILYEAAPTSTLTCDSGPQKQKFSLKLDAKDGRLFNEQNFFQRAAKPLQVNKWKKLYSTPLLAIPTCMGFGVHQDKYRFLVLPSLGRSLQSALDVSPKHVLSERSVLQVACRLLDALEFLHENEYVHGNVTAENIFVDPEDQSQVTLAGYGFAFRYCPSGKHVAYVEGSRSPHEGDLEFISMDLHKGCGPSRRSDLQSLGYCMLKWLYGFLPWTNCLPNTEDIMKQKQKFVDKPGPFVGPCGHWIRPSETLQKYLKVVMALTYEEKPPYAMLRNNLEALLQDLRVSPYDPIGLPMVP

SEQ ID NO: 535 - protein, 306 aa, Homo sapiens
AECEEVRRKSELFNPVSLDCKLRQKAIAEVDVGTDKAQNSDPILDTSSLVPGCSSVDNIKSSQTSQNQGLGRPTLEGDEETSEVEYTVNKGPASSNRDRVPPSSEASEHHPRHRVSSQAEDTSSSFDNLFIDRLQRITIADQGEQQSEENASTKNLTGLSSGTEKKPHYMEVLEMRAKNPVPQLRKFKTNVLPFRQNDSSSHCQKSGSPISSEERRRRDKQHLDDITAARLLPLHHMPTQLLSIEESLALQKQQKQNYEEMQAKLAAQKLAERLNIKMRSYNPEGESSGRYREVRDEDDDWSSDEF

SEQ ID NO: 536 - protein, 70 aa, Homo sapiens
TLEFESHIIFMSHRIFFFCYLKAKIKILGWARWLVPVIPALWEAEVGRSFEARSSRTAWATYGGSLFYKK

SEQ ID NO: 537 - protein, 200 aa, Homo sapiens
KMACNIPNQRQRTLSTTGEALYEILGLHKGASNEEIKKTYRKLALKHHPDKNPDDPAATEKFKEITDAHAILTDISKRSIYDKYGSLGLYVAEQFGDENVNTYFMLSSWWAKALFVIVGLLTGCYFCCCLCCCCNCCCGHCRPESSVPEEDFYVSPEDLEEQIKSDMEKDVDFPVFLQPTNANEKTQLIKEGSRSYCTDS

SEQ ID NO: 538 - protein, 509 aa, Homo sapiens
RLAAAGADPAGSRGGRGSREAPTEAARCRASPPPRAGAMRGSPGDAERRQRWGRLFEELDSNKDGRVDVHELRQGLARLGGGNPDPGAQQGISSEGDADPDGGLDLEEFSRYLQEREQRLLLMFHSLDRNQDGHIDVSEIQQSFRALGISISLEQAEKILHSMDRDGTMTIDWQEWRDHFLLHSLENVEDVLYFWKHSTVLDIGECLTVPDEFSKQEKLTGMWWKQLVAGAVAGAVSRTGTAPLDRLKVFMQVHASKTNRLNILGGLRSMVLEGGIRSLWRGNGINVLKIAPESAIKFMAYEQIKRAILGQQETLHVQERFVAGSLAGATAQTIIYPMEVLKTRLTLRRTGQYKGLLDCARRILEREGPRAFYRGYLPNVLGIIPYAGIDLAVYETLKNWWLQQYSHDSADPGILVLLACGTISSTCGQIASYPLALVRTRMQAQASIEGGPQLSMLGLLRHILSQEGMRGLYRGIAPNFMKVIPAVSISYVVYENMKQALGVTSRSFC

SEQ ID NO: 539 - protein, 207 aa, Homo sapiens
RRRCFQGFLKKKKIIQPKGEGTGRGRGVVPFIHNIVNIHGLYYMCFSLVFACLSVRLSVWGLDLRSRAPLLPQPPPPCPTLGTELEQVWPPNHRWEPAGSAWATASTLAPESCVCKCVCVYACLSMCMYVHGEPVCKYVQRETVTVTEAGGRWGCWRRGLPGADSSQVDPPQVSGRCDRVALRAELLGTQGPQPALLAVHVPTLDGR

SEQ ID NO: 540 - protein, 393 aa, Homo sapiens
  misc_feature (1)...(393): Xaa = any amino acid or nothing
VSFLLWTSGNKEDGRNGPAVPSRHTGGSRTWRMPKXQEGENPCPLPKRNLGNAXTFNSXKRTGPGSPDSKGPDLGPISVPHILSGSPGPSSPTLPQLHDLLAIPVMQGREAGGLRGHRALPLAXEEAGRALQLPLSQPPPCRPAAPFFNQGPQGCCPWRGSGHSPGPQLGGXEPGAYSGWQQTSRMSGVAKPGSGVRPATGSPTRVPPGACSQSLPGTAPSPRPPGPPALLRPAGVGALQGHQSRWQRQTPRAREPRPVPLCSLPAPPGSVGPGPRDSQRRIAGCPXGQTSIFGQCHWGSVGSLGPPRCAGSPCGPLGSRXVHSGLHSSRSASWLPREQQGSPGGGQGPLVWPHSSALRPPGVPGNLPPPIAPKPKRAIPARDPAPPPGLQHE

SEQ ID NO: 541 - protein, 145 aa, Homo sapiens
  misc_feature (1)...(145): Xaa = any amino acid or nothing
MLAIFKYLINNRLITTXQWTEKLTSXQMITIHNTKGLTXSLILLSLIIFIATTNLLGLLPYSFTPTTQLSINLSMAIPLXTVAEFIGFRSKIKNALSHFLPQGTPTPLIPILVIIETISLLIQPILLDVLLTANITAGHLLIHLN

SEQ ID NO: 542 - protein, 187 aa, Homo sapiens
  misc_feature (1)...(187): Xaa = any amino acid or nothing
LNINKKYNYIKRXDYYKIIINKKMNIIXINKXYNKEXYKXNMKKIIKYXIYYSQVSTPTIVKVSRNLGKVGSKCCKHPEAKRMPCAEDYLYVVLNQLXVLHEKTPVNDRVTKCXKESLVNRRPCFSTLEVDKTYVTKKFNAETFTFHADICTLSEKERQIKKQTALDELVKHKPKATKEQLKAVMDD

SEQ ID NO: 543 - protein, 64 aa, Homo sapiens
  misc_feature (1)...(64): Xaa = any amino acid or nothing
SSSSSSPSTPGPPSPFLRQPPFGLNPFLPAGDXGTQRGGSGRGGRGRGRDGSTNEGRGERRGQG

SEQ ID NO: 544 - protein, 130 aa, Homo sapiens
  misc_feature (1)...(130): Xaa = any amino acid or nothing
AKRKSVPEEIWKSRGQFKNQQLNKENNLGQEIATCTKIPSRKRDIEFNEFVKNFTVRSILVAEQIDPMEENCHKYGTCXKMLKQNSDLIIQESMMEKKKPCKYSECGRTFRGHITLVQHQITHCGERPCI

SEQ ID NO: 545 - protein, 96 aa, Homo sapiens
  misc_feature (1)...(96): Xaa = any amino acid or nothing
NNKNKIASKRKKNSPEPGGLTTELYQTSKEELEPILLNLFQKIEKEEILSNSFRETSIALIPKPGKDITKEVNHRPISLMNRDAKVLNKMLSNXIQ

SEQ ID NO: 546 - protein, 139 aa, Homo sapiens
  misc_feature (1)...(139): Xaa = any amino acid or nothing
GKPPFYFGGPGFFPPPVYFKPPPPKNFFGPPKKKKFPPPPGVYFFFFLRPPPPLFFFFFFFFFFFFFXEGGGEKPSPPIKKGFFKPKKFFSPPPGGKKKPPFLKKKKKKKDVPQSSNLESSLSFPIHKTGTIIPASLNV

SEQ ID NO: 547 - protein, 129 aa, Homo sapiens
  misc_feature (1)...(129): Xaa = any amino acid or nothing
HTLLLQCLSAVAFSQPCPHPSRLCNPCCASGPPCSSXACCPRFCQSCPVCXPQNLLSSCPSPDLALTSPSAGRPRCWWNCCQLTPCLSLQTQEWTGAHLQLRRWGTQAGPEEPVHQRTVGSTSHSCSYA

SEQ ID NO: 548 - protein, 137 aa, Homo sapiens
  misc_feature (1)...(137): Xaa = any amino acid or nothing
RWSARSRITGEEGSESAVQERXLTYHTHGGIANRDRTHCPVSLVNVSSMSAGDVITAGKMQGKVVLAEPTAALCHGNGLHYYRQDWSHAAAYVTVPPVRVDTNTSTYLMSLLANDTLNIVASDRRPFTTKQKAMGNV

SEQ ID NO: 549 - protein, 117 aa, Homo sapiens
  misc_feature (1)...(117): Xaa = any amino acid or nothing
GCLVSLGVSHAWQRVGTWEIFVGXMNAGXMSAXTRGTEISRIGQWMGGEGMSGLTSWFLLGEMNPXGLRELNLLLTLSITMNGETIACAEGCQAICDTGTSLLTGPTSPIAQHQSDI

SEQ ID NO: 550 - protein, 143 aa, Homo sapiens
LLDNCQMTVLGAPTCIHGNTVSVICTGSLTQPLFPCLANVSDPYLSAVPEGSALICLEDKRLRLVDGDSRCAGRVEIYHDGFWGTICDDGWDLSDAHVVCQKLSCGVAFNATVSAHFGVGAGPIWLDDLNCTGMESHLRQCPF

SEQ ID NO: 551 - protein, 80 aa, Homo sapiens
  misc_feature (1)...(80): Xaa = any amino acid or nothing
FFFFFFXXXGVXGLNFFFFXFFXXFFFFFFFXFXXXXXFFFFFXGXXXXFXXFXXXXXFFFFFFFFFFFFFFFFFFFXCY

SEQ ID NO: 552 - protein, 28 aa, Homo sapiens
  misc_feature (1)...(28): Xaa = any amino acid or nothing
EVMHFCLFVFXDRVLLCHPGWSAVAQSQ

SEQ ID NO: 553 - protein, 87 aa, Homo sapiens
  misc_feature (1)...(87): Xaa = any amino acid or nothing
TAPKKKKGGAPLGGPPRGPILPRIPENRRPPXXGALLKPSPGPRFNTAWPGKPAPRESLKRAPSLGGGPKRPNPPPEVKASGADKKL

SEQ ID NO: 554 - protein, 121 aa, Homo sapiens
  misc_feature (1)...(121): Xaa = any amino acid or nothing
YHIVQPSPXPLAGALSALLMTSGLAMRSHFHSITLLILGLLSSTLTIYQXWRDVTRESTYQGHHTPPVRKGLRYGIILFITSEVIFFAGLFXAFYHSSLAPTPQLGGHWPPTGITPLNTLE

SEQ ID NO: 555 - protein, 63 aa, Homo sapiens
  misc_feature (1)...(63): Xaa = any amino acid or nothing
LMNSNSIPPIPLRPTHTPPMKKLXIRTAYPRFRYDQLIHLLXKNFLPLTLALLIXHVKKKKKK

SEQ ID NO: 556 - protein, 95 aa, Homo sapiens
  misc_feature (1)...(95): Xaa = any amino acid or nothing
PACGGFSPPPPPKFFFFPPPLFFFGGGGPPFPPPPKGFFFPNPPRGFFFPPPXKKKFFFPPPPFFCPPPVFFFCPPPLFFFFFFFFFFFFFFFFF

SEQ ID NO: 557 - protein, 124 aa, Homo sapiens
  misc_feature (1)...(124): Xaa = any amino acid or nothing
FVAAEVRDGGGGAGTRPPSGRMKRRNADCSKLRRPLKRNRITEGIYGSTFLYLKFLVVWALVLLADFVLEFRFEYLWPFWLFIRSVYDSFRYQGLVCLVIHVFHVWGPFSCLEXMLLAILRXLC

SEQ ID NO: 558 - protein, 140 aa, Homo sapiens
  misc_feature (1)...(140): Xaa = any amino acid or nothing
VLNHSYMIPGRRNVTRCISRQLEVQPHALELPDKCSLAFVVRIKRIDGGSLLVQRTIARLCLKKIFSGVFLKMLRIVEPYVTXGFPNLKSVWEFILKHGQAKVKNKTIGQTQWLTPVIPALWEAKDGWIMRSGDRDHPGQ

SEQ ID NO: 559 - protein, 151 aa, Homo sapiens
EVRSHVKVLGEMLVMYRRPGQAPPDQEALQVVYERCEKLRPTLFRLASDTTDDDDALSEILQANDLLTQGVLLYKQVMEGRVTFGNRVTSSLGDIPVSRVFQNPAGCMKTCPLIDLEVDNGPAQMGTVVPSLLHQDLAALGNSDAPVTGMV

SEQ ID NO: 560 - protein, 336 aa, Homo sapiens
RRRADGCIYGVSRRARVVAYRRDEMWSEGRYEYERIPRERAPPRSHPSDESGYRWTRDDHSASRQPEYRDMRDGFRRKSFYSSHYARERSPYKRDNTFFRESPVGRKDSPHSRSGSSVSSRSYSPERSKSYSFHQSQHRKSVRPGASYKRQNEGNPERDKERPVQSLKTSRDTSPSSGSAVSSSKVLDKPSRLTEKELAEAASKWAAEKLEKSDESNLPEISEYEAGSTAPLFTDQPEEPESNTTHGIELFEDSQLTTRSKAIASKTKEIEQVYRQDCETFGMVVKMLIEKDPSLEKSIQFALRQNLHEIGERCVEELKHFIAEYDTSTQDFGEPF

SEQ ID NO: 561 - protein, 482 aa, Homo sapiens
LLIREVFIQVLIKLRVCFVQCFSEADRDIMTLANHWNCPVLSSDSDFCIFDLKTGFCPLNSFQWRNMNTIKGTQNYIPAKCFSLDAFCHHFSNMNKALLPLFAGLCGNDHVNLPIMETFLSKARLPLGATSSKGRRHHRILGLLNWLSHFANPTEALDNVLKYLPKKDRENVKELLCCSMEEYQQSQVKLQDFFQCGTYVCPDALNLGLPEWVLVALAKGQLSPFISDALVLRRTILPTQVENMQQPNAHRISQPIRQIIYGLLLNASPHLDKTSWNALPPQPLAFSEVERINKNIRTSIIDAVELAKDHSDLSRLTELSLRRRQMLLLETLKVKQTILEPIPTSLKLPIAVSCYWLQHTETKAKLHHLQSLLLTMLVGPLIAIINSPGKEELQEDGAKMLYAEFQRVKAQTRLGTRLDLDTAHIFCQWQSCLQMGDVSQPAAVHSSPRARPNSTVQWKPGARTMPATASIDLCRKSPEHMS

SEQ ID NO: 562 - protein, 59 aa, Homo sapiens
TRHFYLKKNNFPPTQKSCLPLFSLSSLCVCVCVCVCVCVCVCVYSSAFKKTRRMHRWIR

SEQ ID NO: 563 - protein, 99 aa, Homo sapiens
GLVNMALYVSPIVSGEVIRSRGGSTSEFTPGYVKPKHEVNPQMTLRRLPDEDPQNLADPAYRRRRIIMQNMRDEELAIAQVEEMQAVSAVLKGKYTMTG

SEQ ID NO: 564 - protein, 80 aa, Homo sapiens
SFVVEELSWALQMLGRIPGLFAQIQNLGKEKIFWKEFSILDANKNTDVSWKEIKIATLTGVWKKLILTFETVSYKSQNQH

SEQ ID NO: 565 - protein, 112 aa, Homo sapiens
YDVIVGGELFSDYSDRPRKFVALNPKLKSTGAGRYQFLSRWWDAYRKQLGLKDFSPKSQAAVALQQIKERGALPMIDRGDIRQAIDRCSNMWASLPGAGYGQFEHKADSLIA

SEQ ID NO: 566 - protein, 87 aa, Homo sapiens
QEEWSLLSEAQRCLYHDVMLENLTLISSLGCWYGAKDETPSKQTLSIQQESPLRTHWTGGNDVTLKLRLEYTGMVIPHCGLKLLGLK

SEQ ID NO: 567 - protein, 56 aa, Homo sapiens
TPGWTQLDSSQVNLYRDEKQENHSSLVSLGKTETLICLKISWHSLRIRTYWAVRSC

SEQ ID NO: 568 - protein, 72 aa, Homo sapiens
TQQQAARSSEAHSWQSSSTQSLLEKFFLWRYSRGLRISLWFETESHCVPQVGVRWCDLGSLKPLPPGFRRFS

SEQ ID NO: 569 - protein, 254 aa, Homo sapiens
RDKHINNLKKKCQKESEQNREKQQRIETLERYLADLPTLEDHQKQSQQLKDSELKSTELQEKVTELESLLEETQAICREKEIQLESLRQRETEFSSAGHSLQDKQSVEETSGEGPEVEMESWQKRYDSLQKIVEKQQQKMDQLRSQVQSLEQEVAQEEGTSQALREEAQRRDSALQQLRTAVKELSVQNQDLIEKNLTLQEHLRQAQPGSPPSPDTAQLALELHQELASCLQDLQAVCSIVTQRAQGHDPNLSL

SEQ ID NO: 570 - protein, 129 aa, Homo sapiens
KVFCQMNSLLDARSLSLTSMLFVCEVCVKMCDPAKGAAGQRTIAALLPCLLDKGMMSTVTEVRALSINTLVKISKSAGAMLKPHAPKLIPALLESLSVLEPQVLNYLSLRATEQEKAAMDSARLSAAKS

SEQ ID NO: 571 - protein, 65 aa, Homo sapiens
ALTSPTLPQPLPGATVIEPLDDISAVTDILTHREGARLETPPPWLAMFTDQPALPNPCSPASVGP

SEQ ID NO: 572 - protein, 227 aa, Homo sapiens
GPRQKRKPKSSSSGTKGKGNLEPYLNFLPLSQVNNKFGLRCKNCKTNIHEHCQSYVEMQRCFGKIPPGFHRAYSSPLYSNQQYACVKDLSAANRNDPVFETLRTGVIMANKERKKGQADKKNPVAAMMEEEPESARPEEGKPQDGNPEGDKKAEKKTPDDKHKQPGFQQSHYFVALYRFKALEKDDLDFPPGEKITVIDDSNEEWGRGKIGEKVGFFPSNFIIWGPA

SEQ ID NO: 573 - protein, 40 aa, Homo sapiens
FRPADKTNVKAAWGKVGAHAGEYGAEALERMFLSFPTTCI

SEQ ID NO: 574 - protein, 128 aa, Homo sapiens
RTDSSTTNRESVNSEDGDAKEPPYRGPFCGRDRVHTDFTPSPYDTDSLKLKKGDIIDIISKPPMGTWMGLLNNKVGTFKFIYVDVLSEDEEKPKRPTRRRRKGRPPQPKSVEDLLDRINIKEHMPTCI

SEQ ID NO: 575 - protein, 152 aa, Homo sapiens
RVVQTVDPSKAQAKPHTLWVAFAKLYEDNGQLDDARVILEKATKVNFKQVDDLASVWCQCGELELRHENYDEALRLLRKATALPARRAEYFDGSEPVQNRVYKSLKVWSMLADLEESLGTFQSTKAVYDRILDLRIATPHVFGRSEDQASTR

SEQ ID NO: 576 - protein, 131 aa, Homo sapiens
CRECTEGEHAELPTVPLKDVVEQHKASLQVQLDAVNKRLPEIDSALQFISEIIHQLTNQKASIVDDIHSTFDELQKTLNVRKSVLLMELEVNYGLKHKVLQSQLDTLLQGQESIKSCSNFTAQTLNHGTKA

SEQ ID NO: 577 - protein, 130 aa, Homo sapiens
  misc_feature (1)...(130): Xaa = any amino acid or nothing
LLYTYVLLASGVWVAXAYHRLIENNRNQIIQALLITILLGLYFTLLQASEHLQSPFTISDGIYGSTFFVATGFHRLHVIIGSTLLTICFIPQLIFDFTSKHHFGIQAAVXYWHLVDGVXLFMHGSIXWVA

SEQ ID NO: 578 - protein, 588 aa, Homo sapiens
  misc_feature (1)...(588): Xaa = any amino acid or nothing
ISHSLSTQDPNGESIIYNSSFSAVDSFAVSSPASDYLELDTIKNLVKKYSQFINFPIYVWSSKTETVEEPMEEEEAAKEEKEESDDEAAVEEEEEEKKPKTKKVEKTVWDWELMNDIKPIWQRPSKEVEEDEYKAFYKSFSKESDDPMAYIHFTAEGEVTFKSILFVPTSAPRGLFDEYGSKKSDYIKLYVRRVFITDDFHDMMPKYLNFVKGVVDSDDLPLNVSRETLQQHKLLKVIRKKLVRKTLDMIKKIADDKYNDTFWKEFGTNIKLGVIEDHSNRTRLAKLLRFQSSHHPTDITSLDQYVERMKEKQDKIYFMAGSSRKEAESSPFVERLLKKGYEVIYLTEPVDEYCIQALPEFDGKRFQNVAKEGVKFDESEKTKESREAVEKEFEPLLNWMKDKALKDKIEKAVVSQRLTESPWLLWVGQPSTDWSGNMRDFMKAQAYQPGKDILPNYYASQKKTFEINPRPPLIRDMLRRIKEDEDDKTVLDLAVVLVXNRQRLGSGYLFTQTLKAYGDWRLERMLRLSFEHLTPDAKGGRRAPKEEPXKRQQKDTSRKTQSRDEEMQEMGWWETDEEEETSQRNPTA

SEQ ID NO: 579 - protein, 142 aa, Homo sapiens
  misc_feature (1)...(142): Xaa = any amino acid or nothing
IASGRPFFFFFFFFFFFFFFFFFFFFFFFFFFFFFFFFFFFFFFFFFFFFFFFFFFFFFFFFFFFFFFFFFXFYILKIFFFFFILEILCYLSNYGVGVTYIRMSYYKXMLESYFFFTINIFFIGNNYLISLIYNIYAVKRQL

SEQ ID NO: 580 - protein, 54 aa, Homo sapiens
GSTTPAMEFASLFKKILLIDCRDRGLALLPRLVLSSWPQVIFLPWPPKFLGLRT

SEQ ID NO: 581 - protein, 90 aa, Homo sapiens
  misc_feature (1)...(90): Xaa = any amino acid or nothing
ESSCDWLNAYLTLVRCAQDXADYFAERLYKSMKGAGTDEETLIRIIVTRAEVDLHGIKAKFQEKYQKSLSDMVRSDTFGDFRKLLVALLH

SEQ ID NO: 582 - protein, 149 aa, Homo sapiens
  misc_feature (1)...(149): Xaa = any amino acid or nothing
LYIFSPSRLIFFRGFSFFFFPPKKIFFLKIFPNDFFFPSHFFKIPSLGFFFYTFFIRKIFFFFPIIYFSPPGFFFXSPPFFFFFFFFFFFFFFFFFFFFFFFFFFFFFFFFFFFFFFFFFFFFFFFFFGWYKQRPSQARVWTASLDFTL

SEQ ID NO: 583 - protein, 208 aa, Homo sapiens
GDLPDPCKFNFFPIPGPSLSSPPSPWIMFKKFDEKENVSNCIQLKTSVIKGIKNQLIEQFPGIEPWLNQIMPKKDPVKIVRCHEHIEILTVNGELLFFRQREGPFYPTLRLLHKYPFILPHQQVDKGAIKFVLSGANIMCPGLTSPGAKLYPAAVDTIVAIMAEGKQHALCVGVMKMSAEDIEKVNKGIGIENIHYLNDGLWHMKTYK

SEQ ID NO: 584 - protein, 113 aa, Homo sapiens
  misc_feature (1)...(113): Xaa = any amino acid or nothing
FFFFEDKVSLCHPRWECSDDITAHCSLNLGFKXSSHLSLPKXLCLLGTQHYAPANFLYFVFFVETGFRHVGQAGLEHLGSTDPPASAFPKCWDYRCEPPCSTRFYYLSXLNFG

SEQ ID NO: 585 - protein, 146 aa, Homo sapiens
  misc_feature (1)...(146): Xaa = any amino acid or nothing
IPPTMGNLALGGKNSSRGFVDSLICNSSRAFMDWRALLSSLNDFASLSFAESWDNVGLLVEPSPPHTVNTLFLTNDLTDEVMDEVLLKKAHLILSYHPSIFRPMKRITWNTWKELLVIRALENRVGIYSPYTTXEAAPQGVNNWVA

SEQ ID NO: 586 - protein, 341 aa, Homo sapiens
  misc_feature (1)...(341): Xaa = any amino acid or nothing
DGVSLLLYRLEYNGVISPHCNPGSSDSPASASRVAGITGMRHHAQLIFVFLVETGFHHVGQAGLELLTSGDPPASASQSAGITGMSHHAWPDVNYLKNFQVILMGQGWNPCSGPIRAPGCHKRMHALTPVGLGGFGNVLLLFXDGCLSVAHPGAQWHDHSSLQPRPPGLRYPPASASXVSASGFHDDLGPRHTTLVLFRGQSCTRSPSATAPPRSTDMQSXAALFPRGSCVGFLGPSVDYRTPAEDLLGMPHCLCFPSSLNTQSGLAMMPLCLLASPPLEQPSWHATLLAAGHCAFCLYRSAVMLPKXQQQQQQQRLGTWLMPVFPAVRDQPGQHGETLSL

SEQ ID NO: 587 - protein, 77 aa, Homo sapiens
  misc_feature (1)...(77): Xaa = any amino acid or nothing
VDHLRSEVXDQPGQHIVKPRLYXKIQKLAGHGGACLXSPLLGKLRQENRLNPGARSCSEPRSHYCTPAWGTEXNSVS

SEQ ID NO: 588 - protein, 107 aa, Homo sapiens
  misc_feature (1)...(107): Xaa = any amino acid or nothing
GYCFSRRSGSMALWRAYQRALAAHPWKVQVLTADFWGGRQHCWPHASSYTCRPRPPGLKDIASCSSLQEATSCPSAFCAXNSKATKQLVERRGLQEHQRGRTLTMVS

SEQ ID NO: 589 - protein, 172 aa, Homo sapiens
  misc_feature (1)...(172): Xaa = any amino acid or nothing
VGSQGLVPKKNRPAGKDLGAPSGGPPRKCIPWQGLLLTASLLALXEAPTTAWLFIASAPYEVAEGENVHLSVVYLRENLYSYGWYKGKTVEPNQLIAAYVIDTHVRTPGPAYSGRETISPSGDLHFQNVTLEDTGYYNLQVTYRNSQIEQASHHLRVYESVAQPSIQASSCI

SEQ ID NO: 590 - protein, 117 aa, Homo sapiens
VTRAHCWKMERSLRQSLLEPVPPSLPNSVLGWCAELRVLCKLEENVQATNSPSEAEEFQLEVSGLLGEMNCPYLSLTSGDVTKRLLIQKNCLLLLTYLISELEAARMLCVNAPPKKS

SEQ ID NO: 591 - protein, 37 aa, Homo sapiens
DRVSLLLPRLDCNGTILVHCGLRLPGFKRFSCLSLPS

SEQ ID NO: 592 - protein, 122 aa, Homo sapiens
QPQTDTMVHLTPEEKAAATVLWGKGNVDEVGGEALVKLIGAYPWTQRFFESFGDLSTPDAVMGNPNGKAHGAKVLGAFSDGLAHLDNLKGTFATLSELHCDKLHVDAENFMLLGNVLVCELA

SEQ ID NO: 593 - protein, 87 aa, Homo sapiens
IISVKRWMEPGQHGKTPPPLKIQRLAGHSQVLRGLRHKNCLNPGDGGCSEPRVFHCTPAWVTEEDPVSLSKKREMDGNNTTFTPSQL

SEQ ID NO: 594 - protein, 139 aa, Homo sapiens
  misc_feature (1)...(139): Xaa = any amino acid or nothing
PQTQREPTMGLSAADXTNVXAGWGKVGAHAGEYGAEALERMFLSFPTTKTYFPHFDLSHGYAQDKGHGMKVADALTNAVAHVDDMPNALYALSDLHAHKLXVDPVNFKLLNHCLVVTLACHLLAEVTPGVHAFLDKFPG

SEQ ID NO: 595 - protein, 121 aa, Homo sapiens
  misc_feature (1)...(121): Xaa = any amino acid or nothing
SYPETWALEDASLEQMDNGYWGYMMTDPVTLNVGGHLYTTILTTLTRYPDSMLGAMNGGDFPTAXDPQGNYFIDLDGPLFRYVLNFLRTSELTLPLDFKEFDLLLKXSDFYQIEPLIQCIN

SEQ ID NO: 596 - protein, 86 aa, Homo sapiens
  misc_feature (1)...(86): Xaa = any amino acid or nothing
SFRRPMASASTQPAALSAEQAKASIHXFLALSAGPAVCSPTPTRDASLGCFWRAVVLAEVIQAFSAPENAVRMDEARDNACNDMGK

SEQ ID NO: 597 - protein, 34 aa, Homo sapiens
  misc_feature (1)...(34): Xaa = any amino acid or nothing
EHRPGVVAHACNPSTSGGQGEWITXGQEFKTSLG

SEQ ID NO: 598 - protein, 58 aa, Homo sapiens
  misc_feature (1)...(58): Xaa = any amino acid or nothing
KKKKKKKKRGEIGKFYSLLEELTARSWFSCFFIFXDKQGLPWWLGISYKGSGQYDIQA

SEQ ID NO: 599 - protein, 87 aa, Homo sapiens
  misc_feature (1)...(87): Xaa = any amino acid or nothing
GAEVAPLSIYFTQVPVVHIYSVIMTRLVKLAARKQSPFFLAVFGIYHLLITIHFXRQKKKIYLSIYLSIYLSIYLSIYLNDLTEENC

SEQ ID NO: 600 - protein, 68 aa, Homo sapiens
  misc_feature (1)...(68): Xaa = any amino acid or nothing
NFCTTASXGRGCSEPRXRHCTPAWVTDYDSISNKNXTGGDFIKNIMRNLQDAIIGSVYFHVERVNRLN

SEQ ID NO: 601 - protein, 74 aa, Homo sapiens
  misc_feature (1)...(74): Xaa = any amino acid or nothing
EDHHAGTLITALSSHXFFTXVGLEINMLAFIPVLTKKKKKKRGGPFKGTKFKARGGGRKNFFKGAPKLNSGAGV

SEQ ID NO: 602 - protein, 131 aa, Homo sapiens
VSEEKLLVRIPRVIGATYSLANERLRALEDIEREIGAILQNAGTVILELSKEKTNERLLDRQAAAFTASVQHVEAELSAQIRYLTQVATGQPHEGSSYSSRKDCQMALKRVDYARLKLSDVARTCEQMLEN

SEQ ID NO: 603 - protein, 86 aa, Homo sapiens
GTYALKIIGHKRSSEGVQRHHLKGITEILMNRPSARNALGNVFVSELLETLAQLREDRQVRVLLFRSGVKGVFCAGADLLDREHMS

SEQ ID NO: 604 - protein, 86 aa, Homo sapiens; identical to SEQ ID NO: 603

SEQ ID NO: 605 - protein, 86 aa, Homo sapiens; identical to SEQ ID NO: 603

SEQ ID NO: 606 - protein, 114 aa, Homo sapiens
CSSEDKEDSFYPRNSKKKCKDFSKHQVFCFVLRRESCSVARAGVQWRDLGSLQAPPPGFTPFSWKGEDAVSLNRSIAPQPERQSETLGSNRLRRWRKNYKARRGGHMPVLQVLS

SEQ ID NO: 607 - protein, 89 aa, Homo sapiens
RMKTILSNQTVDIPENVDITLKGRTGIVKGPRGTLRRDFNHINVELSLLGKKKKRLRVDKWRGNTKELSTDRTMCIHCHNMIMVVIHVW

SEQ ID NO: 608 - protein, 32 aa, Homo sapiens
KHTLGWVQWLMPAIPALWEAKVGRSLETHASA

SEQ ID NO: 609 - protein, 99 aa, Homo sapiens
FHFFRKPPESKKPSVPETEADGFVLLGDTTDEQRMTARGKTSDIEANQPLETNKENSSSVTVSDPEMENKAGQTLENSSLMAELLSDVPVTLAPHVLAG

SEQ ID NO: 610 - protein, 93 aa, Homo sapiens
LALFYPQIKAIIFFFYLINASNGSILFFSGPFHTCSLKSSGALWCMIFRGRFHSLVCFSRLSGVLMEVEEHEVLQDSLDRCYSTPPMFFDIPD

SEQ ID NO: 611 - protein, 120 aa, Homo sapiens
NSAPEAGSCWKMKVNISFPATGCQKLIEVDDERKLRTFYDNRMAPEVAVDALVEEWKGYVVRIIGGNDKQGFPMKHGDLTHGRVRLLLSKGHSCYRPRRTGERKRKSLRGCIVDANLSVL

SEQ ID NO: 612 - protein, 120 aa, Homo sapiens
ALIMSFIFEGIYDGFSSVLQFLGLYKKSGKLVFLGLDNAGKTTLLHMLKDDRLGQHVPTLHPTSEELTIAGMTFTTFDLGGHEQARRVWKNYLPAINGIVFLVDCADHSRLVESKVELNA

SEQ ID NO: 613 - protein, 69 aa, Homo sapiens
RGIPRLERPNPSLTLAPDTQDLFKLCCKCNKSDPVPPLTRKKKKKKKKKKKKKKKKKKKKKKKKKRGAL

SEQ ID NO: 614 - protein, 70 aa, Homo sapiens
ELAPLQSLRKGPGLLSPPRACPVPTPAVSRTLLGNFEESLLRGRFAPSGHIDGYTAEIGASGSYCPQHVT

SEQ ID NO: 615 - protein, 379 aa, Homo sapiens
VPAQPPKSRLSRGELLGLKRPVLVRPRWVGSEQAEATMEQCACVERELDKVLQKFLTYGQHCERSLEELLHYVGQLRAELASAALQGTPLSATLSLVMSQCCRKIKDTVQKLASDHKDIHSSVSRVGKAIDRNFDSEICGVVSDAVWDAREQQQQILQMAIVEHLYQQGMLSVAEELCQESTLNVDLDFKQPFLELNRILEALHEQDLGPALEWAVSHRQRLLELNSSLEFKLHRLHFIRLLAGGPAKQLEALSYARHFQPFARLHQREIQVMMGSLVYLRLGLEKSPYCHLLDSSHWAEICETFTRDACSLLGLSVESPLSVSFASGCVALPVLMNIKAVIEQRQCTGVWNHKDELPIEIELGMKCWYHSVFACPILY

SEQ ID NO: 616 - protein, 136 aa, Homo sapiens
VGPKFEPDRSAGRRLAVVFRGNTPSLWLSMSIVTVQLGQCGNQIGFEVFDALLSDSHSSQGLCSMRENEAYQASCKERFFSEEENGVPIARAVLVDMEPKVINQTLSKAAQSGQWKYGQHACFCQKQGSGNNWAYG

SEQ ID NO: 617 - protein, 136 aa, Homo sapiens; identical to SEQ ID NO: 616

SEQ ID NO: 618 - protein, 72 aa, Homo sapiens
CTWNENQRMEIVWEVLFLLQANFIVCISAQQNSPKIHEGWWAYKEVVQGSFVPVPSFWGLVNSAWNLCSVGK

SEQ ID NO: 619 - protein, 43 aa, Homo sapiens
LNYHQNINDFFETESHSVTRLECSGTILAQCNLCLLSPSDSPP

SEQ ID NO: 620 - protein, 186 aa, Homo sapiens
  misc_feature (1)...(186): Xaa = any amino acid or nothing
RHIVIGEGKLKGQPGASVAAPCVRLVPHSIPVLALSPGLLCSARSTKQKNSCQQLKEDVDQTKWGTDTPSMDXILMEEVKLEEQLKEVVEEYKLALSDTEGLQQSIQKLVDEANMCSIQGFCMDSLEVADVLENGTQCVSXQKNSCQQLKEDVDPNQMGDRYSLYGLDTHGRSQVRRATEGGCGRI

SEQ ID NO: 621 - protein, 96 aa, Homo sapiens
  misc_feature (1)...(96): Xaa = any amino acid or nothing
RKGQQQTCLSLRVSWLYRKVTFSIFFFFLILXKXRWGLTMVTQAGLKLLGTSNPPAFALPKCWDYRCKSLPPAQKLTFSKATTKKTPQICQSMKVS

SEQ ID NO: 622 - protein, 271 aa, Homo sapiens
  misc_feature (1)...(271): Xaa = any amino acid or nothing
HETMEAAPSRFMFLLFLLTCELAAEVAAEVEKSSDGPGAAQEPTWLTDVPAAMEFIAATEDLEIPAVPILHSMVQKFPGVSFGISTDSEVLTHYNITGNTICLFRLVDNEQLDLEDEDIESIDATKLSRFIEINSLHMVTEYNPVTVIGLFNSVIQIHLLLINEPRPPQKYEENMHRYQKAAKLFQGKIPPLFLVGQLDERKMGKVISFFKLKESQLPALQFTRLXDDEWDTLPTAEVSVEHVQNFCDGFLSGKLLKENRESEGKTPKVEL

SEQ ID NO: 623 - protein, 90 aa, Homo sapiens
  misc_feature (1)...(90): Xaa = any amino acid or nothing
DRVSLLSPRLECSGVVSAHCKLRLPGSRRFSCLSLSGSWDYRRPPPRPANFFVFLVETGFHCGLDLLTSXSARLGLPKCWDYKREPPHPA

SEQ ID NO: 624 - protein, 685 aa, Homo sapiens
  misc_feature (1)...(685): Xaa = any amino acid or nothing
NSSWPAEPAASPWRPLWRALGATFPSGSQPAARTPAGPCIGGMAPPGFKHVSSMLALTIIASTWALTPTHYLTKHDVERLKASLDRPFTNLESAFYSIVGLSSLGAQVPDAKKACTYIRSNLDPSNVDSLFYGWPRASQALSGMXRSLFSNETKDLAFGQLFSXGTSSVYPRSYHASVAALKWALGLPLASQEALSALTARLSKEETVLATVQALQTASHLSQQADLRSIVEEIEDLVARLDELGGVYLQFEEGLETTALFVAATYKALMDHVGTEPSIKEDQVIQLMNAIFSKKNFESLSEAFSVASAAAVLSHNRYHVPVVVVPEGSASDTHEQAILRLQVTNVLSQPLTQATVKLEHAKSVASRATVLQKTSFTPVGIVFELNFMNVKFSSGYYDFLGRKLKGDNRYISNTVELRVQDPPTEVGITNVDLSTVDKDQSIAPQTTRVTYPAKAKGTFIADSHQNFALFFQLVGVNTGAELTPHQTFVRLHNQKTGQEVVFVAEPDNKNVYKFELDTSERKGLNLTSRSGTYTFYLIIGDATLKNPILWNVADVVIKFPEEEAPSTVLSQNLFTPKQEIQHLFREPEKRPPTVVSNTFTALILSPLLLLFALWIRIGANVSNFTFAPSTIIFHLGHAAMLGLMYVYWTQLNMFQTLKYLAILGSVTFLAGNRMLAQQAVKRTAH

SEQ ID NO: 625 - protein, 140 aa, Homo sapiens
  misc_feature (1)...(140): Xaa = any amino acid or nothing
QGSKVFIKKCSTSSLTREMQISTQRSHCGTLIXASEVRKSGXHQCQRXLWEGDLLHCXXQCELMEPTWKMAWHQLLEKKTHSPLDLPVPHQGLDMAVMCYQGACARNLYSQILTIAPNWNQPTYPSGREWMLKNARIAIG

SEQ ID NO: 626 - protein, 316 aa, Homo sapiens
  misc_feature (1)...(316): Xaa = any amino acid or nothing
SVSTTRSFSVDSSAKTAAMPVTVTRTTITTTTTSSSGLGSPMIVGSPRALTQPLGLLRLLQLVSTCVAFSLVASVGAWTGSMGNWSMFTWCFCFSVTLIILIVELSGLQARFPLSWRNFPITFACYAALFCLSASIIYPTTYVQFLSHGRSRDHAIAATFFSCIACVAYATEVAWTRARPGEITGYMATVPGLLKVLETFVACIIFAFISDPNLYQHQPALEWCVAVYAICFILAAIAILLNLGECTNVLPIPFPSFLSGLAFCLSSSMPPPLFSGPSTSSMRSMAASLGAREMXAAAAAMPTTCVPGTADWLWPS

SEQ ID NO: 627 - protein, 685 aa, Homo sapiens
GCQRFMINMGDSHVDTSSTVSEAVAEEVSLFSMTDMILFSLIVGLLTYWFLFRKKKEEVPEFTKIQTLTSSVRESSFVEKMKKTGRNIIVFYGSQTGTAEEFANRLSKDAHRYGMRGMSADPEEYDLADLSSLPEIDNALVVFCMATYGEGDPTDNAQDFYDWLQETDVDLSGVKFAVFGLGNKTYEHFNAMGKYVDKRLEQLGAQRIFELGLGDDDGNLEEDFITWREQFWPAVCEHFGVEATGEESSIRQYELVVHTDIDAAKVYMGEMGRLKSYENQKPPFDAKNPFLAAVTTNRKLNQGTERHLMHLELDISDSKIRYESGDHVAVYPANDSALVNQLGKILGADLDVVMSLNNLDEESNKKHPFPCPTSYRTALTYYLDITNPPRTNVLYELAQYASEPSEQELLRKMASSSGEGKELYLSWVVEARRHILAILQDCPSLRPPIDHLCELLPRLQARYYSIASSSKVHPNSVHICAVVVEYETKAGRINKGVATNWLRAKEPVGENGGRALVPMFVRKSQFRLPFKATTPVIMVGPGTGVAPFIGFIQERAWLRQQGKEVGETLLYYGCRRSDEDYLYREELAQFHRDGALTQLNVAFSREQSHKVYVQHLLKQDREHLWKLIEGGAHIYVCGDARNMARDVQNTFYDIVAELGAMEHAQAVDYIKKLMTKGRYSLDVWS

SEQ ID NO: 628 - protein, 589 aa, Homo sapiens; identical to SEQ ID NO: 284

SEQ ID NO: 629 - protein, 603 aa, Homo sapiens
SNLPEANVMSIVIPLGVDTAETSYLEMAAGSEPESVEASPVVVEKSNSYPHQLYTSSSHHSHSYNGFAPMRTHNRVLVPPPNTPAPPPPSVLISKNEVGHIYPLPNFDETSQCLPTISTSEDGSYGTDVTRCICGFTHDDGYMICCDKCSVWQHIDCMGIDRQHIPDTYLCERCQPRNLDKERAVLLQRRKRENMSDGDTSATESGDEVPVELYTAFQHTPTSITLTASRVSKVNDKRRKKSGEKEQHISKCKKGSAPEIDPSSDGSNFGWETKIKAWMDRYEEANNNQYSEGVQREAQRIALRLGNGNDKKEMNKSDLNTNNLLFKPPVESHIQKNKKILKSAKDWPPDALIIEYRGKFMLREQFEANGYFFKRPYPFVLFYSKFHGLEMCVDARTFGNEARFIRRSCTPNAEVRHEIQDGTIHLYIYSIHSIPKGTEITIAFDFDYGNCKYKVDCACLKENPECPVLKRSSESMENINSGYETRRKKGKKDKDISKEKDTQNQNITLDCEGTTNKMKSPETKQRKLSPLRLSVSNNQEPDFIDDIEEKTPISNEVEMESEEQIAERKRKMNWTVDGCGSWFWFRAEASVKALGLTLNVLFG

SEQ ID NO: 630 - protein, 603 aa, Homo sapiens; identical to SEQ ID NO: 629

SEQ ID NO: 631 - protein, 106 aa, Homo sapiens
LGHCNLSIYSYEIKTGVPSPRGMIYLLLCVCVCVCLPNHAIIVMLNRTEPYVPEGGAYLPEREPFIVPVEPERTAEYEDYGADEPAEEPPEPHRRWRRALPHGPGQ

SEQ ID NO: 632 - protein, 84 aa, Homo sapiens
  misc_feature (1)...(84): Xaa = any amino acid or nothing
QIESSSLNVNKKDNHTKTPSEGHQHQRPKVDKSLKMRKKQRKKAENSKNQNASSPPKEHNSSPAKEQNXTENEFDELTEVGFRM

SEQ ID NO: 633 - protein, 37 aa, Homo sapiens
  misc_feature (1)...(37): Xaa = any amino acid or nothing
MESCSVTQVGVQWHNQLTATPPPRFKRLSSXDYRACI

SEQ ID NO: 634 - protein, 80 aa, Homo sapiens
  misc_feature (1)...(80): Xaa = any amino acid or nothing
RHKKRCLTYLTIKXMQIKTKMRYHFTHSRMFIVKKDSKCWQICGEIEILTHCWWKCTMVQSLWKIVXPFLKMMEKMRSEF

SEQ ID NO: 635 - protein, 132 aa, Homo sapiens
  misc_feature (1)...(132): Xaa = any amino acid or nothing
AQGPYLARHEPLTASSLSRSAMSSEPPPPPQPPTHQASVGLLDTPWSRERSPSPLRGNVVPSPLPTRRTRTFSAXVTGSSGLGSTLNLQGAFLVSHPQPTAQPQVCLFGSPGHRPKNGQRHSESLASGKRSI

SEQ ID NO: 636 - protein, 566 aa, Homo sapiens
FPARPTRPRTRGGVVVGAAAAGPRCGSARAQVAEGAVRNIQAEGHRQIPDLTWTTLLLLARPFNSPPLRSGLAPPPDLSLVLLQALTLDLRWLPHLSGAMATGADVRDILELGGPEGDAASGTISKKDIINPDKKKSKKSSETLTFKRPEGMHREVYALLYSDKKDAPPLLPSDTGQGYRTVKAKLGSKKVRPWKWMPFTNPARKDGAMFFHWRRAAEEGKDYPFARFNKTVQVPVYSEQEYQLYLHDDAWTKAETDHLFDLSRRFDLRFVVIHDRYDHQQFKKRSVEDLKERYYHICAKLANVRAVPGTDLKIPVFDAGHERRRKEQLERLYNRTPEQVAEEEYLLQELRKIEARKKEREKRSQDLQKLITAADTTAEQRRTERKAPKKKLPQKKEAEKPAVPETAGIKFPDFKSAGVTLRSQRMKLPSSVGQKKIKALEQMLLELGVELSPTPTEELVHMFNELRSDLVLLYELKQACANCEYELQMLRHRHEALARAGVLGGPATPASGPGPASAEPAVTEPGLGPDPKDTIIDVVGAPLTPNSRKRRESASSSSSVKKAKKP

SEQ ID NO: 637 - protein, 566 aa, Homo sapiens; identical to SEQ ID NO: 636

SEQ ID NO: 638 - protein, 289 aa, Homo sapiens
LTRAPPPSTQVRPVPGPPAGAVVAAPGGALASVSFDSRDSKMAAQSAPKVVLKSTTKMSLNERFTNMLKNKQPTPVNIRASMQQQQQLASARNRRLAQQMENRPSVQAALKLKQSLKQRLGKSNIQARLGRPIGALARGAIGGRGLPIIQRGLPRGGLRGGRATRTLLRGGMSLRGQNLLRGGRAVAPRMGLRRGGVRGRGGPGRGGLGRGAMGRGGIGGRGRGMIGRGRGGFGGRGRGRGRGRGALARPVLTKEQLDNQLDAYMSKTKGHLDAELDAYMAQTDPETND

SEQ ID NO: 639 - protein, 297 aa, Homo sapiens
RPAEPDPGSGHPEPKSPTLSAVMSAEVKVTGQNQEQFLLLAKSAKGAALATLIHQVLEAPGVYVFGELLDMPNVRELAESDFASTFRLLTVFAYGTYADYLAEARNLPPLTEAQKNKLRHLSVVTLAAKVKCIPYAVLLEALALRNVRQLEDLVIEAVYADVLRGSLDQRNQRLEVDYSIGRDIQRQDLSAIARTLQEWCVGCEVVLSGIEEQVSRANQHKEQQLGLKQQIESEVANLKKTIKVTTAAAAAATSQDPEQHLTELREPAPGTNQRQPSKKASKGKGLRGSAKIWSKSN

SEQ ID NO: 640 - protein, 129 aa, Homo sapiens
RLHVVPMARYEEVSVSGFEEFHRAVEQHNGKTIFAYFTGSKDAGGKSWCPDCVQAEPVVREGLKHISEGCVFIYCQVGEKPYWKDPNNDFRKNLKVTAVPTLLKYGTPQKLVESECLQANLVEMLFSED

SEQ ID NO: 641 - protein, 92 aa, Homo sapiens
LFYEEFSYATILTISSSEQKNSIKKSTFCLTLLPRLECSGAVMARCSLNLLGSGDPPASASQVAGTTGACHHTSLIFPFVLYVDSTGLTLKT

SEQ ID NO: 642 - protein, 118 aa, Homo sapiens
DPRVRTREWDSLNYENHIYLMPFIYINIILGGTISLLGRLVYRSHLISSLLCLEGIILSLFIIATLITLNTHSLLTNIGPIAILVFAACEAAGGLSLLGSISNTYGLNYVHNLNLLQC

SEQ ID NO: 643 - protein, 306 aa, Homo sapiens; identical to SEQ ID NO: 535

SEQ ID NO: 644 - protein, 727 aa, Homo sapiens
RPYLGLLKMAALEEEFTLSSVVLSAGPEGLLGVEQSDKTDQFLVTDSGRTVILYKVSDQKPLGSWSVKQGQIITCPAVCNFQTGEYVVVHDNKVLRIWNNEDVNLDKVFKATLSAEVYRILSVQGTEPLVLFKEGAVRGLEALLADPQQKIETVISDEEVIKWTKFFVVFRHPVLIFITEKHGNYFAYVQMFNSRILTKYTLLLGQDENSVIKSFTASVDRKFISLMSLSSDGCIYETLIPIRPADPEKNQSLVKSLLLKAVVSGNARNGVALTALDQDHVAVLGSPLAASKECLSVWNIKFQTLQTSKELPQGTSGQLWYYGEHLFMLHGKSLTVIPYKCEVSSLAGALGKLKHSQDPGTHVVSHFVNWETPQGCGLGFQNSEQSRRILRRRKIEVSLQPEVPPSKQLLSTIMKDSEKHIEVEVRKFLALKQTPDFHTVIGDTVTGLLERCKAEPSFYPRNCLMQLIQTHVLSYSLCPDLMEIALKKKDVQLLQLCLQQFPDIPESVTCACLKIFLSIGDDSLQETDVNMESVFDYSINSVHDEKMEEQTEILQNGFNPEEDKCNNCDQELNKKPQDETKESTSCPVVQKRAALLNAILHSAYSETFLLPHLKDIPAQHITLFLKYLYFLYLKCSENATMTLPGIHPPTLNQIMDWICLLLDANFTVVVMMPEAKRLLINLYKLVKSQISVYSELNKIEVSFRELQKLNQEKNNRGLYSIEVLELF

SEQ ID NO: 645 - protein, 118 aa, Homo sapiens
WWPVLRRWTMKTFRWKVKPGMDVASVPSVRKVRFGDGYSQRAPAGLNANLKTYSVTLSVPREEATVLESFLEEHGGWKSFLWTPPYEWRQIKVTCAKWSSRVSMLRVEFSAEFEQVVN

SEQ ID NO: 646 - protein, 164 aa, Homo sapiens
QSVWVAQPPAVTADLQFLEGSGEKNAPTAVLRKRQEEMRPLDIDEVEAPEEVEVLEPEEDFEQFLLPVINEMREDIASLIREHGRAYLRTRSKLWEMDNMLIQIKTQVEASEESALNHVQHPSGEADERVSELCEKAEEKAKEIAKMAEMLVELVWRIERSESS

SEQ ID NO: 647 - protein, 171 aa, Homo sapiens
QASGLYSFLTLAPMTHLLLTATVTPSEQNSSREPGWETAMAKDILGEAGLHFDELNKLRVLDPEVTQQTIELKEECKDFVDKIGQFQKIVGGLIELVDQLAKEAENEKMKAIGARNLLKSIAKQREAQQQQLQALIAEKKMQLERYRVEYEALCKVEAEQNEFIDQFIFQK

SEQ ID NO: 648 - protein, 243 aa, Homo sapiens
TGNKMQDPNADTEWNDILRKKGILPPKESLKELEEEAEEEQRILQQSVVKTYEDMTLEELEDHEDEFNEEDERAIEMYRRRRLAEWKATKLKNKFGEVLEISGKDYVQEVTKAGEGLWVILHLYKQGIPLCALINQHLSGLARKFPDVKFIKAISTTCIPNYPDRNLPTIFVYLEGDIKAQFIGPLVFGGMNLTRDELEWKLSESGAIMTDLEENPKKPIEDVLLSSVRRSVLMKRDSDSEGD

SEQ ID NO: 649 - protein, 68 aa, Homo sapiens
MTRQEELAAARAALHDLMTGKRVATVQKDGRRVEFTATSVSDLKKYIAELEVQTGMTQRRTGPAGFYV

SEQ ID NO: 650 - protein, 48 aa, Homo sapiens
RSYFPYSPGMFGDDCHQLCDCEGETFCHPKTEKCLCPRGRTGARCDAG

SEQ ID NO: 651 - protein, 124 aa, Homo sapiens
LRMTTATRQEVLGLYRSIFRLARKWQATSGQMEDTIKEKQYILNEARTLFRKNKNLTDTDLIKQCIDECTARIEIGLHYKIPYPRPIHLPPMGLTPLRGRGLRSQEKLRKLSKPVYLRSHDEVS

SEQ ID NO: 652 - protein, 439 aa, Homo sapiens
CDAPLGGSIAGPFDQLEEILGWESAAAHSAELVAKGTVGKRKWGCAGASSSGSALLPPCRELLMGHRFLRGLLTLLLPPPPLYTRHRMLGPESVPPPKRSRSKLMAPPRIGTHNGTFHCDEALACALLRLLPEYRDAEIVRTRDPEKLASCDIVVDVGGEYDPRRHRYDHHQRSFTETMSSLSPGKPWQTKLSSAGLIYLHFGHKLLAQLLGTSEEDSMVGTLYDKMYENFVEEVDAVDNGISQWAEGEPRYALTTTLSARVARLNPTWNHPDQDTEAGFKRAMDLVQEEFLQRLDFYQHSWLPARALVEEALAQRFQVDPSGEIVELAKGACPWKEHLYHLESGLSPPVAIFFVIYTDQAGQWRIQCVPKEPHSFQSRLPLPEPWRGLRDEALDQVSGIPGCIFVHASGFIGGHRTREGALSMARATLAQRSYLPQIS

SEQ ID NO: 653 - protein, 550 aa, Homo sapiens
QNAKVGSEAIQVLPAFPREVQRLPEPAKSCRQRQLEARKAAAEKKKIQKEKLSTPEKIKQEALELAGITSDPGLSLKGGLSQQGLKPSLKVEPQNHFSSFKYSGNAVVESYSVLGNCRPSDPYSMNSVYSYHSYYAQPSLTSVNGFHSKYALPSFSYYGFPSSNPVFPSQFLGPGAWGHSGSSGSFEKKPDLHALHNSLSPAYGGAEFAELPSQAVPTDAHHPTPHHQQPAYPGPKEYLLPKAPLLHSVSRDPSPFAQSSNCYNRSIKQEPVDPLTQAEPVPRDAGKMGKTPLSEVSQNGGPSHLWGQYSGGPSMSPKRTNGVGGSWGVFSSGESPAIVPDKLSSFGASCLAPSHFTDGQWGLFPGEGQQAASHSGGRLRGKPWSPCKFGNSTSALAGPSLTEKPWALGAGDFNSALKGSPGFQDKLWNPMKGEEGRIPAAGASQLVFYQHKNLNQPNHGLALWEAKMKQLAERARARQEEAARLGLGQQEAKLYGKKRKWGGTVVAEPQQKEKKGVVPTRQALAVPTDSAVTVSSYAYTKVTGPYSRWI

SEQ ID NO: 654 - protein, 218 aa, Homo sapiens
  misc_feature (1)...(218): Xaa = any amino acid or nothing
KYRWGFTVLARMVSISXSRDLPVSASQSAGIIGVSHRARPRFYFLISLWHLLYFLIFFQSXQXMKNLCLKKLPDDSNYCSCTTLFKTGNLSCLPDILCTKSXYSVSCKSFANSYIQKKHDKMXKENGVRXGIINNLRLSIILILILISXLSYFNDFHXNSGTSLIVSXHYYLNKHDLHPNYFILLFCFSFVRQGLRSVAQAGVQWCDLGSLEPPPPRF

SEQ ID NO: 655 - protein, 99 aa, Homo sapiens
  misc_feature (1)...(99): Xaa = any amino acid or nothing
SKSPPPKRKLFPSSPPKTFYPPPHSGVFPPFPPXNFFFSPRGLIFGGGFFQFFPPPKKRFFSKIPEAFLKVPPKRKKIVFATAPVYFGPPREFFKGPPP

SEQ ID NO: 656 - protein, 72 aa, Homo sapiens
  misc_feature (1)...(72): Xaa = any amino acid or nothing
PSSSSPFFFFFPPPQKGIFFPPFFFCFPRVFSPPPFFIPPPRIFFLGPLKKKKTPPPPGGKNFFFXRAPPSP

SEQ ID NO: 657 - protein, 27 aa, Homo sapiens
GYWGCAIGKARQAAKTEIEKLQVIINA

SEQ ID NO: 658 - protein, 73 aa, Homo sapiens
YPMFQVQPVQHVYPAQVQYVEGGDAVYTNGAMCVLLPRATPGTLSLTPAFATWGGIKQIPLPYAFGDVFTKYC

SEQ ID NO: 659 - protein, 235 aa, Homo sapiens
HRPDGCPDIGPTGELSGSLKIPNRDSGIDSPSSSVAGENFPCEEGLEAGPSPTVLGAHAEMALDSQVPKVTPQEEADSDVGEEPDSENTPQKADKDAGLAQHSGPQKLLHIAQELLHTEETYVKRLHLLDQVFCTRLTDAGIPPEVIMGIFSNISSIHRFHGQFLLPELKTRITEEWDTNPRLGDILQKLAPFLKMYGEYVKNFDRAVGLVSTWTQRSPLFKDVVHSIQVRRRRG

SEQ ID NO: 660 - protein, 125 aa, Homo sapiens
MAEMQLAELRAEIKHFVSERKYDEELGKAARFSCDIEQLKAQIMLCGEIPHPKNNYSSRTPCSSLLPLLNAHAATSGKQSNFSRKSSTHNKPSEGKAANPKMVSSLPSTADPSHQTMTANKQNGE

SEQ ID NO: 661 - protein, 125 aa, Homo sapiens; identical to SEQ ID NO: 660

SEQ ID NO: 662 - protein, 259 aa, Homo sapiens
  misc_feature (1)...(259): Xaa = any amino acid or nothing
TLQTLAPATVQTVAAPQVQQVPVSGWKGFREALVGAVNWSLVEDVVFMAAVQNPALTALTTPIQTAALQVPVRAAFSPTLLPPPLFLEVLVFRDVKQVPGGVKQLEPPKEGERRTTHNIIEKRIRSSINDKIIELKDLVMGTDAKVGAKQNCVLCSTISPLPVFASGAXRSPRLKVSEYKTELEVLFYXSILVSCQDYKILKNIRDWXGLIRQXPAETFDSFGYALQLMGTPLSEAEKDACHSVVPDTGLCVPWSQLMA

SEQ ID NO: 663 - protein, 104 aa, Homo sapiens
YITPGICPSLSTMKAIVECAGGKVLSKQPSFRKLMEHKQNSVGRVESASESVIALYHIQRSVTEKLIFFSLSLSEIILISCENDLHLCREYFARGIGTFPRLPV

SEQ ID NO: 664 - protein, 127 aa, Homo sapiens
ASLSCGGLHPVRASWLLCLTKQAWAMEGAPPPASLPPCSLISDCCASNQRDSVGVGPSEPCAGYNLVVRRFLSRSEKRNIRVGVTRFSRCVLSPLSLTQKGNSLTPCASQARQCLALLRLAHGARTH

SEQ ID NO: 665 - protein, 125 aa, Homo sapiens
GRVRLLNNWDVCANMFGTFFDTEDPGEFKMKYWGVTSFLQKGNDDHWIVDTDYDTYAGQYSCRLLNLDGTCADSYSFVFSRDPNGLPPEAQKIVRQRQEELCLARQYRLIVHNGYCDGRSKRNLL

SEQ ID NO: 666 - protein, 35 aa, Homo sapiens
QAGLELLTSDDLPASASKSAGTTGVSHRARPTLVF

SEQ ID NO: 667 - protein, 38 aa, Homo sapiens
GNVLPVLYGEMRVGSRVVSQEISTADEGDGGQVVVIGR

SEQ ID NO: 668 - protein, 111 aa, Homo sapiens
TEQKSKSKQHRVSRRAQQRAESPESSAIESTQSTPQKGRGRPSKTPSPSQPKKNVRVGRSKQAATKENDSSEEVNVFQGSSPVDDIPQEETEEEEVSTVNVRRRSAKRERR

SEQ ID NO: 669 - protein, 39 aa, Homo sapiens
NYRRRPRPPNAPSQDGKEAKAGEAPTENPAPPTQQSSAE

SEQ ID NO: 670 - protein, 39 aa, Homo sapiens; identical to SEQ ID NO: 669

SEQ ID NO: 671 - protein, 93 aa, Homo sapiens
KTENDHINLKVAGQDGSLVQFKIKRRTPLSKLMKAYCERQGLSMRHITLRFDGQSINETDTPAQLEMEDEDTIDVFQQQTESVPDSILAGHSF

SEQ ID NO: 672 - protein, 145 aa, Homo sapiens
ERVLENVEHYQELKKMVQQSDLGQYVTFLRSFSDKQKISLLHSCTCVLYTPSNEHFGIVPLEAMYMQCPVIAVNSGGPLESIDHSVTGFLCEPDPVHFSEAIEKFIREPSLKATMGLAGRARVKEKFSPEAFTEQLYRYVTKLAG

SEQ ID NO: 673 - protein, 210 aa, Homo sapiens
KADFMRPRISFVDRCYIFSMLDNEVGANPRGGHQCGSALSCDEGVPAAQGASSEKPHECTKCGKALCCRSDLRVHHGVHAGEKSSACSERGSGFREKLCPDKQGTHTKEKPARDSRSGKTIFRKTRLCVPGTVHAGAKPYKCWECEKTSHKSRLIEHLRSHTGEKPCGCRECGKAFFQKSHLILRQRTHTGEKPCGCAECGKAAPRTPAS

SEQ ID NO: 674 - protein, 79 aa, Homo sapiens
VWPLPCRDADAQSEGINASARYPKNWVTTGDPAREFTMIHSAPLMLLADPDEFESVQLAQSWPLGAIVSLWRSPCRKMN

SEQ ID NO: 675 - protein, 148 aa, Homo sapiens
  misc_feature (1)...(148): Xaa = any amino acid or nothing
RGININKKDVHTETPCKGHQHQRPKVDKSMKMRKSXCKKAENSKNQNGSSPAKDYNSSPAREQNWMENWLDKLTEVGFIRWIITNSFKLKEHVLTQCKELRSFEKKLEELLTKIISLEKTISVXGEGXIQILDRSLXRVCVGYLRRSC

SEQ ID NO: 676 - protein, 135 aa, Homo sapiens
  misc_feature (1)...(135): Xaa = any amino acid or nothing
AAAAAADMERQEESLSARPALETEGLRFLHTTEGSLLATYGWNIVFSCILLYVVFQKLSARLRALRHRQLDRAAAAVEPDVDVKLQEALAAARLKMQEELNAQVEKHKEKLKQLEXEKRRQTIEMWDSMQDGKSY

SEQ ID NO: 677 - protein, 194 aa, Homo sapiens
  misc_feature (1)...(194): Xaa = any amino acid or nothing
GGWLAFPLACPGRCHQPPAAYASAALLNLGRPEAPAHPQTAGSVRPAAVPPGCXGRTGGAGSPAGHSATGPAAPPPRGSTSSAPPARQAEAGLESSSAQVIRPPRSSKVLGLQAXATAPGLPQLSEGDPGFPSGRVTWIGQSPASEDSWRPSAVSSLTYSPVSPARGCRSPSXKSGKTXKSRQPKRENPPGTAP

SEQ ID NO: 678 - protein, 72 aa, Homo sapiens
ILKAQATVGISINLDSPFTSPPLREEIMANNFSLESHNISLTEHSSMPVENNITLERPSNVNLTCQFTTSGD

SEQ ID NO: 679 - protein, 53 aa, Homo sapiens
GNMKKQGISNFISYIYTHTHTHTHTHTYIYIYIHIYTYTHTYNFFFLERELHS

SEQ ID NO: 680 - protein, 74 aa, Homo sapiens
RRPECVWGRRGPAGEESEQTALIPLPRGLLTPPNWSGPPGLPPAASQPIILPGPGPSPNLLKSSTSSERSRGAK

SEQ ID NO: 681 - protein, 258 aa, Homo sapiens
PWVLTMNFSGGGRQEAAGSRGRRAPRPREQDRDVQLSKALSYALRHGALKLGLPMGADGFVPLGTLLQLPQFRGFSAEDVQRVVDTNRKQRFALQLGDPSTGLLIRANQGHSLQVPKLELMPLETPQALPPMLVHGTFWKHWPSILLKGLSCQGRTHIHLAPGLPGDPGIISGMRSRCEIAVFIDGPLALADGIPFFRSANGVILTPGNTDGFLLPKYFKEALQLRPTRKPLSLAGDEETECQSSPKHSSRERRRIQQ

SEQ ID NO: 682 - protein, 133 aa, Homo sapiens
FDQPPGLKATRDEKDSLLNIARGKKNGEKTRRVSSRKKPALKATSDEKDSFSNITRGKKDGEISRKVSSQKPPTLKGTSDEEDSVLGIARENKDGEKSRTVSSEKPPGLKASSDEKENVLNIARVYCVRCRGS

SEQ ID NO: 683 - protein, 382 aa, Homo sapiens
  misc_feature (1)...(382): Xaa = any amino acid or nothing
EALHLAHFGLTGFTQTHCARAWGGQTRKRRRVPRDPGGANCAGGGVSADTSGLAAAARGPPTLGFRERRSARSLDRIRPILVLMVDKKLVVVFGGTGAQGGSVARTLLEDGTFKVRVVTRNPRKKAAKELRLQGAEVVQGDQDDQVIMELALNGAYATFIVTNYWESCSQEQEVKQGKLLADLARRLGLHYVVYSGLENIKKLTAGRLAAAHFDGKGEVEEYFRDIGVPMTSVRLPCYFENLLSHFLPQKAPDGKSYLLSLPTGDVPMDGMSVSDLGPVVLSLLKMPEKYVGQNIGLSTCRHTAEEYAALLTKHPARSCTMPRXLLRTTKSLAFPVPGTWLNMFRFYALRPDRDIELTLRLNPKALTLDQWLEQHKGDFNLL

SEQ ID NO: 684 - protein, 736 aa, Homo sapiens
PNSMVVEHPEFLKAGKEPGLQIWRVEKFDLVPVPTNLYGDFFTGDAYVILKTVQLRNGNLQYDLHYWLGNECSQDESGAAAIFTVQLDDYLNGRAVQHREVQGFESATFLGYFKSGLKYKKGGVASGFKHVVPNEVVVQRLFQVKGRRVVRATEVPVSWESFNNGDCFILDLGNNIHQWCGSNSNRYERLKATQVSKGIRDNERSGRARVHVSEEGTEPEAMLQVLGPKPALPAGTEDTAKEDAANRKLAKLYKVSNGAGTMSVSLVADENPFAQGALKSEDCFILDHGKDGKIFVWKGKQANTEERKAALKTASDFITKMDYPKQTQVSVLPEGGETPLFKQFFKNWRDPDQTDGLGLSYLSSHIANVERVPFDAATLHTSTAMAAQHGMDDDGTGQKQIWRIEGSNKVPVDPATYGQFYGGDSYIILYNYRHGGRQGQIIYNWQGAQSTQDEVAASAILTAQLDEELGGTPVQSRVVQGKEPAHLMSLFGGKPMIIYKGGTSREGGQTAPASTRLFQVRANSAGATRAVEVLPKAGALNSNDAFVLKTPSAAYLWVGTGASEAEKTGAQELLRVLRAQPVQVAEGSEPDGFWEALGGKAAYRTSPRLKDKKMDAHPPRLFACSNKIGRFVIEEVPGELMQEDLATDDVMLLDTWDQVFVWVGKDSQEEEKTEALTSAKRYIETDPANRDRRTPITVVKQGFEPPSFVGWFLGWDDDYWSVGPLGTGPMAGAGLP

SEQ ID NO: 685 - protein, 70 aa, Homo sapiens
  misc_feature (1)...(70): Xaa = any amino acid or nothing
NCFLVFSPARSTVGEFASMSSEECIXMHVVFLFPLTLCVVSLXERQEAEKMFKGKRGAQLAKDIARRSKT

SEQ ID NO: 686 - protein, 453 aa, Homo sapiens
QAQPMGRVGGMAQPMGRAGAPKPMGRAGSARRGRFKGCWSEGSPVHPVPAVLSWLLALLRCASTMLSLRVPLAPITDPQQLQLSPLKGLSLVDKENTPPALSGTRVLASKTARRIFQEPTEPKTKAAAPGVEDEPLLRENPRRFVIFPIEYHDIWQMYKKAEASFWTAEEVDLSKDIQHWESLKPEERYFISHVLAFFAASDGIVNENLVERFSQEVQITEARCFYGFQIAMENIHSEMYSLLIDTYIKDPKEREFLFNAIETMPCVKKKADWALRWIGDKEATYGERVVAFAAVEGIFFSGSFASIFWLKKRGLMPGLTFSNELISRDEGLHCDFACLMFKHLVHKPSEERVREIIINAVRIEQEFLTEALPVKLIGMNCTLMKQYIEFVADRLMLELGFSKVFRVENPFDFMENISLEGKTNFFEKRVGEYQRMGVMSSPTENSFTLDADF

SEQ ID NO: 687 - protein, 65 aa, Homo sapiens
RNMAAATLTSKLYSLLFRRTSTFALTIIVGVMFFERAFDQGADAIYDHVNEGKLWKHIKHKYENK

SEQ ID NO: 688 - protein, 344 aa, Homo sapiens
QWRNSSHRCLLLHPPLRRLPPALPPPPPPCCCSKLLPPLGLKGFQMEHFDASLSTYFKALLGPRDTRVKGWFLLDNYIPTFICSVIYLLIVWLGPKYMRNKQPFSCRGILVVYNLGLTLLSLYMFCELVTGVWEGKYNFFCQGTRTAGESDMKIIRVLWWYYFSKLIEFMDTFFFILRKNNHQITVLHVYHHASMLNIWWFVMNWVPCGHSYFGATLNSFIHVLMYSYYGLSSVPSMRPYLWWKKYITQGQLLQFVLTIIQTSCGVIWPCTFPLGWLYFQIGYMISLIALFTNFYIQTYNKKGASRRKDHLKDHQNGSMAAVNGHTNSFSPLENNVKPRKLRKD
